(19) United States
(12) Patent Application Publication
(10) Pub. No.: US 2023/0099193 A1
(43) Pub. Date: Mar. 30, 2023

(54) PERSONALIZED CANCER LIQUID BIOPSIES USING PRIMERS FROM A PRIMER BANK

(71) Applicant: Pillar Biosciences Inc., Natick, MA (US)

(72) Inventors: Gang Song, Newton, MA (US); Zhaohui Wang, Southborough, MA (US); ShiPing Zou, Medfield, MA (US); Yue Ke, Weston, MA (US)

(21) Appl. No.: 17/936,307

(22) Filed: Sep. 28, 2022

Related U.S. Application Data
(60) Provisional application No. 63/249,925, filed on Sep. 29, 2021.

(51) Int. Cl. C12Q 1/6886; C12Q 1/6869

(52) U.S. Cl. CPC C12Q 1/6886; C12Q 1/6869; C12Q 2600/156; C12Q 2600/16

(57) ABSTRACT

The present invention is directed to a method for detecting somatic mutation in cell free total nucleic acid (cfTNA) in a liquid biological sample by a personalized approach with high sensitivity and specificity. The present invention relates to multiplex amplification of target loci with primers selected from a primer bank for cancer liquid biopsies, including but not limited to minimal residual disease (MRD) monitoring, recurrence monitoring, therapy monitoring, early detecting or screening cancer. Somatic, clonal variants of a patient are first identified by sequencing of the primary tumor and the matched normal sample in the patient. Then customized panel of primer pairs for the patient is selected from a primer bank. Using the selected panel of primer pairs, multiplex polymerase chain reaction and next-generation sequencing are performed on the cfTNA sample from this patient to detect the presence of tumor DNA in the sample.

### REFERENCE TO SEQUENCE LISTING, TABLE OR COMPUTER PROGRAM

[0001] This application contains an ST.26 compliant Sequence Listing, which is submitted concurrently in xml format via Patent Center and is hereby incorporated by reference in its entirety. The .xml copy, created on Sep. 26, 2022, is named 113970-8003.US01.xml and is 4,284 KB in size.

### TECHNICAL FIELD

[0002] The present invention relates to a method for multiplex amplification of target loci with primers from a primer bank for cancer liquid biopsies, including but not limited to minimal residual disease (MRD) monitoring, recurrence monitoring, therapy monitoring, early detecting or screening cancer by a personalized approach with high sensitivity and specificity. Somatic, clonal variants are first identified by sequencing of the primary tumor and the matched normal sample in a patient. Then a customized panel that includes patient-specific primer pairs for each patient is selected from a primer bank based on the patient's tumor/matched normal sequencing data. Using the selected panel of target-enrichment reagents, multiplex polymerase chain reaction and next-generation sequencing are performed on the plasma cell-free nucleic acid sample from this patient to detect the presence of tumor circulating nucleic acid and its specific mutations in the plasma and monitor the disease.

### BACKGROUND OF THE INVENTION

[0003] Data compiled by the American Cancer Society (ACS) show that roughly 40% of the population will develop some sort of invasive malignancy during their lifespan. The 5-year survival rate across all types of cancers is currently between 65 and 70%, but varies greatly depending on cancer type and the stage at which disease is detected and diagnosed. Across all cancer types, the 5 year-survival rate drops from 99% for localized tumors to 27% for metastatic tumors. Early detection, destruction of cancer cells no longer at the primary site and continuous therapy and disease monitoring for each cancer patient are key to improving the cancer survival rate.

[0004] For example, general treatment for colorectal cancer (CRC) consists of either radiation or (neoadjuvant) chemotherapy to shrink the tumor, followed by surgery and additional (adjuvant) chemotherapy to kill any occult disease and reduce the risk of recurrence. It is estimated that 17-40% of curatively treated CRC will recur, with high associated mortality.

[0005] The concept of MRD is a term commonly used with blood cancers that describes the small fraction of cancer cells that remain or come back after treatment, but it has now been extended to solid tumors as well.

[0006] Solid tumors have been shown to compose of regions of different clonality, so a single biopsy may give a biased view of tumor biology. Cell free DNA (cfDNA) fragments have been shown to bear the same unique genetic and epigenetic fingerprint characteristic of the tumor from which they originated. Liquid biopsies, where tumor components are analyzed from patient blood samples, have been shown to give an accurate representation of solid tumor status with a mutation concordance between matched cfDNA and tissue of 83%. A recent survey of NIH clinical trials (www.clinicaltrials.gov) contained over 340 trials that leveraged cfDNA testing, the vast majority to evaluate treatment effectiveness and identify resistance mechanisms

[0007] Currently, the most clinically relevant use of sequence information from liquid biopsies is therapy selection, especially for patients with tumors that are difficult to biopsy or whose health being too compromised to undergo surgery. The approach also leads itself to longitudinal monitoring for treatment efficacy and the development of drug resistance. PHARMGKB, a database of annotated database of drug labeling maintained by Shriram Center for Bioengineering and Chemical Engineering contains about 50 small and large molecule oncology therapeutics where genetic testing is required by drug labelling. Such testing informs treatment selection and monitoring for the presence of resistance mutations. The COSMIC database (cancer.sanger.ac.uk/cosmic/drug resistance) maintained by the Sanger Institute currently lists 28 drugs where resistance mutations have been identified.

[0008] Besides therapy selection by liquid biopsy, a recent analysis of over 90 clinical studies focusing on the use of circulating tumor DNA (ctDNA) to monitor and predict treatment response in CRC concludes that the ctDNA analysis has great value in both areas and outperforms conventional blood markers such as carcinoembryonic antigen (CEA). Comparison of the sensitivity of ctDNA and CEA for CRC recurrence has consistently demonstrated superiority of ctDNA assays, regardless of biomarkers applied. One study showed that 79% of the patients who had post-operative ctDNA detected subsequently developed disease recurrence compared to 29% with elevated CEA. The same study showed that ctDNA was more likely to be positive than CEA at the time of radiological recurrence (85% vs 41%, p=0.002). Better sensitivity of ctDNA (somatic mutations) compared to CEA has been reported in all studies for recurrence after treatment, with sensitivities reported for ctDNA of 73-100%, with CEA sensitivities ranging from 41-67%. Monitoring treatment success with ctDNA also allows for earlier detection of disease recurrence, with ctDNA detecting recurrence 5-10 months prior to CT compared to 2-3 months median lead-time for CEA.

[0009] Analysis of tumor genetics using Next Generation Sequencing (NGS) has been widely utilized to search for mutations associated with prognosis and treatability, but is immensely challenging technically as only about 0.01% of total circulating DNA is tumor-derived. The concentration of cell-free DNA (cfDNA) is influenced by various physiological and pathologic conditions, and the half-life of ctDNA is short, reported to be between 15 minutes and several hours. In addition, recent reports have also indicated that many mutations detected in cfDNA samples actually arise in peripheral blood mononuclear cells via clonal hematopoiesis.

[0010] Natera Inc. has launched Signatera, a personalized, tumor-informed assay optimized to detect ctDNA for MRD assessment and recurrence monitoring for patients previously diagnosed with cancer. A patient-specific panel for each patient is designed on the fly based on the whole exon sequencing (WES) data for each patient tumor. Whereas its broad clinical utility and superior assay performance has been proven by a number of prospective clinical studies, the Signatera test is severely limited by the design on the fly approach. The assay turn-around time is several weeks and each patient specific panel is unlikely to be thoroughly validated prior to its use in patient monitoring. More recently, the Guardant Reveal test using a large cancer mutation panel and a methylation panel shows a sensitivity of 91% and can detect recurrence in colorectal cancer months earlier than the standard-of-care method, CEA tests or imaging. However, Gurardant Reveal's assay performance remains controversial, and is cancer-specific

[0011] There exists a need for a new and improved method of robust detection of somatic mutation in cell free total nucleic acids (cfTNA) in patient's liquid sample. The method needs to be specific, sensitive, and ease of use.

### BRIEF DESCRIPTION OF THE DRAWING

[0012] FIG. 1 illustrates the workflow of sample-to-VOI (variant of interest) identification and testing cfTNA with primers from an off-the shelf (OTS) primer bank.

[0013] FIG. 2 illustrates the formation, amplification, and inhibition of primer dimer. A first forward primer (F1) and the second reverse primer (R2) have a complementary region at their 3′ends. The inhibition of primer dimer formation is by the formation of a stem-loop structure. F1∧ is a partial sequence of the 5′-end portion of the F1 primer that is tagged at the 5′ end of the R2 primer.

[0014] FIG. 3 illustrates that the amplification of amplicon 3, the overlapping region, is inhibited by the formation of a stem-loop structure. F1, R1, F2, R2 are gene-specific primers, which are complementary to specific regions of genomic DNA. Tags t1 and t2 are two different to universal tag sequences. Tag t3 can have the same or different sequence as t2. Tag oligomers of t1, t2 and t3 do not bind to the target sequences. Each tag is at the 5′end of each gene-specific primer. F2∧ is a partial sequence of the 5′-end portion of the F2 primer. 1, 2, 3 and 4 indicate the amplification products from the combination of four primers. Amplification of Amplicon 3, the short products from F2 and R1, is inhibited by the formation of a stem-loop structure.

[0015] FIG. 4 illustrates a flow chart of obtaining customized panel of primers, pre-validating panel of targeted-enrichment reagents, customizing panel of detection reagents, testing reagent, and delivering to customer.

[0016] FIG. 5 shows a flow chart of library preparation including multiplex PCR in one container, purifying, indexing, and quantifying.

[0017] FIGS. 6-1 to 6-3 illustrate procedures of unique identification (UID) tagging, polymerase chain reaction (PCR) amplification and indexing.

[0018] FIG. 7 shows results of detecting somatic mutations in serially diluted SERASEQ™ ctDNA Reference Material. The detection sensitivity was 0.0125%.

[0019] FIGS. 8-1 to 8-46 show a 1,688-amplicon panel targeting 7,118 unique variants of a lung cancer panel. All forward and reverse primers shown in FIG. 8 are target gene-specific primers without tags. *T refers to stem-loop inhibition mediated amplification (SLIMAMP®) tag, a tag added to inhibit the unwanted amplification of overlapping regions of target DNAs in PCR reaction. Y means that SLIMAMP® is needed. N means that no SLIMAMP® tag is needed.

[0020] FIG. 9 shows SLIMAMP® tags of 3 pairs of overlapping amplicons. SLIMAMP® tag is added at the 5′-end of the reverse primer of each primer pair. SLIMAMP® tag is a partial sequence of the 5′-end sequences of the second forward primer of each pair (bold and underlined).

### DETAILED DESCRIPTION OF THE INVENTION

### Definition

[0021] An “amplicon” is a piece of DNA or RNA that is the source (the template) and/or product of amplification or replication events. In this context, “amplification” refers to the production of one or more copies of a genetic fragment or target sequence, specifically the amplicon. As the product of an amplification reaction, amplicon is used interchangeably with common laboratory terms, such as PCR product.

[0022] A “genomic locus,” is a physical site or location within a genome. A genomic locus, to as used herein, refers to a region of interest within a gene.

[0023] “In silico” refers to being performed on computer or via computer simulation.

[0024] A “hot spot” refers to a region that is frequently mutated in a particular cancer.

[0025] A “primer dimer” (PD) is a potential by-product in PCR. A PD consists of primer molecules that are hybridized to each other because of complementary bases in the primers.

[0026] A “unique identifier” (UID), or a “Unique molecular identifier” (UMI), is a DNA barcode that is added at the beginning of amplification that indexes amplification products derived from the same parent. UID can be used to correct error and remove variants introduced during PCR and allow increased sensitivity for true variants.

[0027] “Molecular residual disease” or “minimal residual disease” refers to a small number of cancer cells left in the body of a patient after treatment. These cells have the potential to come back and cause relapse in the patient.

[0028] “Variant allele frequency percentage” (VAF %) is the number of reads containing variant as a fraction of all reads for an amplicon.

[0029] “Whole exome sequencing” (WES), is a genomic technique for sequencing all of the protein-coding regions of genes in a genome.

[0030] The invention provides a method for detecting circulating tumor total nucleic acids (ctTNAs) in a subject by a personalized approach using pre-made target-enrichment reagents including pre-made primer pairs. The method detects one or more mutations in the cell free total nucleic acids (liquid biopsy) of a subject, which may be used to assess that the cancer has recurred or metastasized in the subject, or to evaluate the efficacy of a treatment. This method may be used in liquid biopsy clinical applications, including therapy monitoring, recurrence monitoring, and early detection of cancer. A liquid biopsy, also known as fluid biopsy or fluid phase biopsy, is the sampling and analysis of non-solid biological tissue, primarily blood.

[0031] The present invention provides a method for detecting ctTNAs including ctDNA and/or ctRNA in a patient. Patients suitable for testing by the present method have their whole genome sequence data, WES sequence data, large tumor gene panel sequence data, or specific tumor gene sequence data from a tumor issue available. The sequence data are analyzed using analytical software to determine suitable genomic loci for incorporation into the patient customized test. The selection of target regions of interest is based on the analysis from multiple databases and datasets, including but not limited to COSMIC, TCGA, PCAWG, ICGC and any available non-public database. The databases keep record of cancer patients' genomic data. i.e. which cancer shows which variants. Through the database, the frequency of individual variants in each cancer type and in cancer patients can be summarized.

[0032] The method uses reagents for targeted amplification of between at least 2 to 45 distinct target genomic loci. The results are associated with the request ID to provide chain-of-custody throughout the manufacturing process. Test reagents include a large panel of primer pairs covering target genomic regions. The primer bank is optimized to have the highest likelihood of multiple positive observations across all common cancers and covering hot spots or frequently mutated loci of one or more cancers.

[0033] Once the targeted genomic loci for the patient's customized test panel have been identified, specific primer pairs are selected from the primer bank as an important component of the test reagents. Other test reagents include, but not limited to, index primers, high fidelity PCT master mix. Then the test proceeds with cfTNA of the patient.

[0034] The present invention is directed to a method for detecting circulating tumor nucleic acid (ctTNA) from a liquid biological sample of a patient, including detecting minimal residual disease. A liquid biological sample, for example, includes blood, saliva, urine, sweat, cerebrospinal fluid, plural effusion, etc.

[0035] The method comprises the steps of: (a) preparing cell free total nucleic acid (cfTNA) from the sample obtained at one or more timepoints from a patient who had cancer at an initial timepoint; (b) selecting at least 2-45 individualized primer pairs from a primer bank, wherein the selected individualized primer pairs correspond to at least 2-45 genomic loci of one or more cancer genes, each primer pair is designed to amplify its corresponding genomic locus; wherein said at least individualized 2-45 genomic loci are selected in silico by (i) analyzing sequence data of whole genome, or whole exome, or a large gene panel, or specific cancer genes, of a tumor tissue of the patient, at the initial timepoint by a computational approach; and (ii) choosing at least 2-45 genomic loci containing somatic mutations specific for the patient, based on clonality, detectability, and frequency of the mutation; wherein the primer bank is designed to comprise multiple primer pairs to amplify different genomic loci of a human, and the primer pairs in the primer banks are designed to be compatible in a single oligonucleotide pool by minimizing primer dimer interaction and reducing amplification of overlapping regions of amplicons by stem-loop inhibition during a PCR reaction; (c) adding the at least 2-45 individualized primer pairs into the cfTNA and perform gene-specific multiplex PCR reaction to amplify the selected genomic loci; (d) purifying, indexing, quantifying, normalizing, and sequencing the amplified DNA, and (e) analyzing the sequencing data and determining circulating tumor nucleic acid (ctTNA)—positive if variants are detected in at least one of the genomic loci in cfTNA.

[0036] In step (a), a liquid biological sample from a patient is collected at one time point or at longitudinal timepoints, for preparing cfDNA, cfRNA or both. Prior to cfTNA isolation, the plasma is separated from whole blood by centrifugation, which separates the plasma from the buffy coat (white blood cells) and red blood cells. The plasma layer is removed from the buffy coat to avoid contamination of cellular DNA into the plasma sample. The recovered plasma fraction is optionally subjected to a second centrifugation at high speed to remove much of the remaining cell debris and protein. The plasma fraction is then extracted to simultaneously recover RNA and DNA (total nucleic acids) using validated laboratory methods. The total nucleic acid extraction may use any of the various commercial kits designed for this purpose (e.g., QIAamp® Circulating Nucleic Acid Kit or Norgen).

[0037] In step (b), at least 2-45 individualized primer pairs corresponding to at least 2-45 genomic loci are selected and obtained from a primer bank for the patient. In one embodiment, the least 2-45 individualized genomic loci are 2-45, 2-50, or 2-60, or 2-100, or 2-200, or 2-300 genomic loci, and the least 2-45 individualized primer pairs are the corresponding 2-45, 2-50, or 2-60, or 2-100, or 2-200, or 2-300 primer pairs. Preferably, the at least 2-45 individualized genomic loci are 2-45 or 2-60 genomic loci, and the at least 2-45 individualized primer pairs are the corresponding 2-45 or 2-60 or primer pairs.

[0038] Prior to obtaining these individualized primer pairs, DNA sequence data of a tumor tissue of the patient at an initial time point are analyzed and the at least 2-45 genomic loci containing somatic mutations are selected by a computational approach for the subsequent testing and analysis. As described by McGranahan et al (Sci Transl Med 7:283ra54, 2015), clonal and subclonal mutations can be identified within single tumor samples.

[0039] The DNA sequence data of a patient may be obtained from whole genome, or whole exome (about 20,000-25,000 genes), or a large gene panel (about 400-500 cancer genes), or specific cancer genomes (e.g., about 1-50, 5-50, or 5-10 cancer genes) of a tumor tissue of the patient.

[0040] The DNA sequence data from the patient tumor tissue is optionally compared with the sequence data of a matched germline DNA, at the initial time point by a computational approach. The matched germline DNA may be obtained from a normal tissue, a normal whole blood sample, or white blood cell from the same patient.

[0041] Based on quality and coverage depth of the sequencing results of the patients' tumor tissue, a list of somatic single-nucleotide variants (SNVs) or insertion-deletion variants (Indel) specific to the patient are selected.

[0042] The initial somatic variants are further prioritized based on a list of criteria including, but not limited to, sequencing quality (quality of the sequencer reads), mapping quality (how confident is the alignment of the mutation), variant frequency (the number of the mutations vs the number of the wild types observed), calling confidence level (overall statistical evaluation based on matched normal sample to evaluate how confident the somatic calling is), variant coverage depth (number of reads that actually contain the variant calls), and read bias (location of the mutation in the reads: the more it is towards the center, the better). The loci with optimum GC content (as close to 50% as possible) and higher specificity (amplicon that does not map to multiple locations) are prioritized as well together with the mutation call prioritization.

[0043] In one embodiment, software program that delivers sensitive, robust variant calls, for example, PIVAT® or VERSATILE® (Pillar Biosciences Inc.), is used to compare the DNA sequence data of the tumor tissue and white blood cells of the patient to select a list of somatic variants which are prominent in tumor tissue but not in white blood cells. Such selection is specific to the patient. Rules are then applied to this list to give weight to each variant. Then at least top 2-45, 2-300, 2-200, 2-100, 2-60, 2-50, 2-49, 2-48, 2-47, 2-26, 2-45, 3-10, 3-45, 3-48, 3-50, 5-40, 10-30, 10-35, 10-40, or 15-45 genomic loci are picked as having hot spot mutations specific to the patient's tumor profile. In general, each cancer related gene has 1 to several hundreds of hot spots.

[0044] After the at least 2-45 genomic loci are selected, at least 2-45 individualized primer pairs that are capable to amply the at least 2-45 genomic loci of are then selected from primer pairs of a primer bank.

[0045] We use the public (TCGA, PCAWG, ICGC, COSMIC) and non-public (CLIA Lab) database to search for biomarkers of common cancers. Many genome loci of common cancers are overlapping. We then design one or more primer banks each comprising multiple primer pairs to amplify different genomic loci of a human, in particular, to amplify one or more hot spots of 400-500 cancer genes. The primer pairs in the primer banks are designed to be compatible in a single oligonucleotide pool by minimizing primer dimer interaction and reducing amplification of overlapping regions of amplicons by stem-loop inhibition during a PCR reaction.

[0046] In one embodiment, the primer bank is a physical off-the-shelf (OTS) primer bank that contains primers in a form of pre-made oligonucleotides. These primer pairs are pre-made and pre-validated for amplification of different genomic loci of a human, and they are stand-by and ready for clinical use. Primer pairs from a physical bank can be quickly selected and deployed as individual panels of primer pairs for use, without additional testing of the oligonucleotides. The OTS primer bank may contain 5-5000, 10-5,000, 50-10,000, 500-5,000, 10-10,000 or 50-50,000 primer pairs. For example, the primer pairs in a primer bank are designed to cover at least 80% of a patient of one tumor type with 8 or more mutations, which is sufficient for monitoring MRD.

[0047] In another embodiment, the primer bank is a virtue bank in which all the sequences of the primers are designed and exist in silico, for amplification of different genomic loci of a human. In a virtue primer bank, the designed primer pairs can be validated as tests are conducted. Each primer pair only needs to be tested for quality control (QC) one time to verify the effectiveness prior to clinical testing, and then it can be reused without additional QC testing in future occurrences. Virtual bank may not have a fast turnaround time in the beginning; but it can be gradually built to include a larger primer pair pool and it eventually achieves a fast turnaround time. Virtual bank has unlimited number of primer pairs, if desired, to cover entire genome of all living species where PCR amplification is possible.

[0048] In a further embodiment, the primer bank is a combined physical bank and virtue bank. A subset of the primer pairs is pre-made and pre-validated in a physical form. The rest of primer pairs are added using the strategy described in virtual bank. The physical bank can be gradually growing by adding new primers from the virtual bank. The combined physical bank and virtue bank provides an initial fast turnaround time with common mutations from the physical bank, and the coverage of additional personal mutation of interest is added from the virtue bank later for a better sensitivity of detection.

[0049] After the selection of at least 2-45 genomic loci, at least 2-45 individualized primer pairs that are capable to amply the at least 2-45 genomic loci are then selected from a primer bank by overlapping the primer pairs in the primer bank with the selected genomic loci. If there are any primers that will form dimers, the less important dimers are deleted from the initial selection. Due to the low oligo dimer occurrences in an original primer bank, most of the primers can be selected without the need to delete some primers to avoid primer dimer formation. The selection of primer pairs from a primer bank can use software such as VERSATILE® to identify the best primers that cover the selected variants, without dimer formation.

[0050] This selected panel of primer pairs from a primer bank covers hot spots about at least 10-45 target regions of the patient; the target regions are optimized to have the highest likelihood of multiple positive observations across all common cancers or the cancer(s) of interest.

[0051] In view of DNA fragmentation observed in clinical specimens, the length of the amplification product is preferred to be short to maximize amplification yield.

[0052] Each primer pair has a forward primer and a reverse primer, having a length of ≤125 nucleotides or ≤100 nucleotides in general. Each forward primer or reverse primer contains a gene-specific sequence, which is a target-specific sequence complementary to the target DNA of the selected genomic loci. The gene-specific sequence typically has 6-40, 10-50, 10-40, 10-100, 20-40, or 20-50 nucleotides in length. Each forward primer and each reverse primer typically also contain a tag at the 5′-end of each gene-specific sequence; the tag does not bind to the target DNA sequence, and it contains a priming site for a subsequent amplification. The tag sequences are at least 2 or 3 nucleotides in length, and can be 5-100, 3-40, 10-30, 10-40, 10-50 nucleotides long. In one embodiment, the tag sequences of most or all of the forward primers in a primer bank are the same; and the tag sequences of most or all of the reverse primers in the primer bank are same, and they are referred to as universal tags. Depending on the specific design (e.g. to modify the melting temperature of the amplified DNAs), variable sequences and various lengths may be optionally added to the 5′-end of the universal tags.

[0053] In one embodiment, a UID is added in either a forward primer or a reverse primer to identify individual nucleic acid molecule in the starting sample. In one example, as shown in FIG. 6-1, a reverse primer may comprise from 5′ to 3′ a first segment containing a first tag, which is a priming site for subsequent amplification, a second segment containing a UID to identify each nucleic acid molecule, and a third segment complementary to the target DNA. The UID in general contains 6-14 nucleotides or 8-12 nucleotides. A forward primer may comprise from 5′ to 3′ a first segment containing a second universal tag, which is a priming site for subsequent amplification, and a second segment complementary to the target DNA. In another example, a forward primer may comprise from 5′ to 3′ a first segment containing a first tag, which is a priming site for subsequent amplification, a second segment containing a UID, and a third segment complementary to the target DNA; and a reverse primer may comprise from 5′ to 3′ a first segment containing a second universal tag, and a second segment complementary to the target DNA.

[0054] In another embodiment, when overlapping amplicons are needed to cover a long region of interest, the primers are designed according to SLIMAMP® tag strategy (See FIG. 3).

[0055] The primer pairs are designed to be compatible in a single oligonucleotide pool by avoiding or inhibiting primer dimer formation and by inhibiting amplification of overlapping regions of amplicons by stem-loop inhibition during a PCR reaction.

[0056] In general, the primers in a primer bank are designed and selected to avoid or reduce primer dimer problem. Primer-dimers (primers that are hybridized to each other because of complementary bases in the primers) are identified in an automated manner with a software such as VERSATILE®, and removed from the final pool.

[0057] Primer dimer problem can also be resolved according to U.S. Pat. No. 9,605,305, which is incorporated herein by reference in its entirety. The principle of the design to avoid or reduce primer dimer formation during PCR is shown in FIG. 2, which illustrates how to prevent the exponential amplification of a primer dimer. In FIG. 2, a forward primer F1 and a reverse primer R2 have a complementary region at their 3′-ends. After Cycle 1, PD-Strand 1 and PD-Strand 2 are formed. In Cycle 2, on the left side, PD strand 2 forms a stem loop, in which t1 and F1∧ anneal to their complementary counterparts respectively to form a stem, and the remaining nucleotides form a loop. Due to high local concentrations of t1 and F1∧ and their respective complementary counterparts, i.e., they are on the same PD Strand 2 and are close to each other, the formation of the stem loop is more favorable than the annealing with a separate t1F1 primer; therefore, further primer annealing is blocked, and no further amplification product of PD-Strand 2 can be obtained. The presence of F1∧ is important in order to completely block the primer (t1_F1) annealing to PD Strand 2 and then the amplification of PD Strand 2. Without F1∧, the primer t1_F1 may outcompete the stem structure containing only t1 and then anneal to PD Strand 2. With the addition of F1∧, primer t1_F1 can no longer outcompete the stem structure containing t1_F1^{A} for annealing to PD Strand 2.

[0058] To achieve the coverage of a continuous sequence over a long target region, amplicons may be overlapped. To avoid amplification of overlapping region of amplicons, the primers are designed according to U.S. Pat. No. 10,011,869, which is incorporated herein by reference in its entirety. The principle of the primer design to inhibit amplification of the overlapping region of two amplicons is shown in FIG. 3. As shown at the lower part of to FIG. 3, amplicon 1 (F1+R1), Amplicon 2 (F2+R2), and Amplicon 4_long (F1+R2) are amplified exponentially by PCR, while the amplification of Amplicon 3_overlap (F2+R1) is inhibited. This is because F2 and R1 gene-specific segments are tagged with the same tag t1, and therefore in the presence of F2∧(a partial sequence of the 5′-end portion of the F2 primer) in between t1 and R1, a strong stem loop structure containing the sequences of t1 and F2∧ forms and prevents the hybridization of primer t1F2 to the amplicon 3 template, which inhibits the further exponential amplification of amplicon 3.

[0059] A flow chart of one embodiment for preparing pre-made and pre-validated target enrichment reagents to carry out step (b) is illustrated in FIG. 4.

[0060] In one embodiment, all of the at least 2-45 individualized primer pairs are selected and obtained from a primer bank.

[0061] In another embodiment, instead of selecting all of the at least 2-45 individualized primer pairs from a primer bank, a small portion of primer pairs, e.g., 1-5 or 1-10 primer pairs can be made specifically for the patient after selecting the 2-45 genomic loci. These specifically made primer pairs can be mixed with the primer pairs from a primer bank to provide one component of the target enrichment reagent. These specifically made primer pairs can be used when some patient's variants are not covered by the primer bank.

[0062] In step (c), the at least 2-45 individualized primer pairs are added into cfTNA in one pool and gene-specific multiplex PCR reaction is performed to amplify the selected genomic loci in one single container. The amplification reaction does not require having multiple amplification reactions in separate containers and then pooling the amplified products; this is due to the design of the primers that avoids primer dimer formation and reduces amplification of overlapping regions of amplicons.

[0063] In step (d), the amplified DNA are purified, indexed, quantified, and normalized, before being sequenced by a sequencer.

[0064] Steps (c) and (d) are illustrated in flow charts of FIGS. 5 and 6.

[0065] Library preparation procedure includes three or four steps: (1) conversion of RNA to cDNA (this step is optional), (2) gene-specific multiplex PCR amplification with or without UID (3) a brief indexing PCR amplification that applies the sample-specific barcodes that allow sample pooling, (4) and library normalization and pooling for sequencing. (See FIG. 5)

[0066] 1. Conversion of cfRNA to complementary DNA (optional step, skip it if use cfDNA as input directly): cDNA is produced from cfRNA using reverse transcriptase and priming with random hexamers. The entire undiluted cDNA reaction can be added to the linear PCR without inhibiting the reaction. Alternatively, with a higher cfRNA input, the cDNA reaction can be diluted with low TE or nuclease-free water. The recommend minimum input is 10 ng of total circulating nucleic acid.

[0067] 2. Gene-specific multiplex PCR amplification: SLIMAMP® Multiplex PCR is performed with or without UID tags. A randomer tag is added to sample DNA and cDNA molecules by a brief linear PCR. The purpose of the UID tag is to identify members of an amplification cluster that arose from the clonal outgrowth of a single sample nucleic acid molecule. This information is subsequently used to error correct mutations introduced during PCR amplification to allow higher sensitivity sample mutation detection.

[0068] 3. Universal indexing PCR amplification: SLIMAMP® products are purified with a PCR cleanup procedure. The purified products are then indexed by PCR using indexing primers to enable multiplex sequencing on a sequencer such as NextSeqDx.

[0069] 4. Library normalization: The indexed libraries are subsequently purified, quantified and normalized for library pooling. The pooled libraries are then run on a sequencer such as NextSeqDx using a paired-end sequencing protocol.

[0070] Because it is critical to reduce PCR errors in low-frequency variant detection, to minimize the PCR error, all PCR processes utilize a high-fidelity polymerase with an error rate>100-fold lower than that of Taq DNA Polymerase. Gene-specific primers can be tagged with a Unique Identifier (UID) containing 8-20 random bases, errors from PCR amplification and from the sequencing process can be reduced by calling the consensus bases across all reads within a UID family (See FIGS. 6-1 and 6-2).

[0071] The products from PCR are subsequently purified via size selection. After purification, another round of PCR adds index adaptors of P5 and P7 sequences to each library for sample tracking and sequencing on Illumina's flow cells. Those products are further purified and sequenced (FIG. 6-3).

[0072] In step (e), the sequence data are analyzed.

[0073] The base calls are generated on the sequencing instrument (e.g. MiSeq, NextSeq and NovaSeq) during the sequencing run by Real Time Analysis (RTA) software during primary analysis. After the sequencing run, a software, BCL2FASTQ, is used to perform the initial two steps as described below.

[0074] Demultiplexing: Each sample is tagged with unique indexes during the indexing PCR step. The demultiplexing step divides the sequence reads into separate files according to the index information specified in the sample sheet.

[0075] FASTQ File Generation: After demultiplexing, on-instrument MiSeq-Reporter generates the FASTQ files that contain the cluster-passing-filter reads for each sample with quality scores and paired-end information.

Subsequently, the FASTQ files are analyzed with Pillar's PIVAT® software that performs the rest of the secondary analysis and reports out detected target variants.

[0076] The biomedical information of the patient obtained in step (e) may be used for predicting, prognosing, or diagnosing a disease state of the patient. For example, the biomedical information may be used to determine the efficacy of a drug therapy of the patient, to predict an optimal drug dosage, to recommend one or more therapies, or to recommend a course of treatment of a disease. For example, the method can be used to detect minimal residual disease. After analyzing the sequencing data and determining whether ctTNA is positive or negative in step (e), the present method may further comprise a step (f) for determining a therapy choice or a change in therapy for the patient.

[0077] The following examples further illustrate the present invention. These examples are intended merely to be illustrative of the present invention and are not to be construed as being limiting.

### EXAMPLES

### Example 1. Library Preparation Protocol

### Example 1A. Gene-specific PCR (GS-PCR)

[0078] 1. Prepare a PCR master mix: Vortex and spin the HiFi PCR MMX and oligo pool before use. For each PCR reaction, the volume of each component is listed below in Table 1.

TABLE 1

| Reagent | Volume (μL) |
|---|---|
| HiFi PCR Master Mix (4x) | 12.5 |
| GS-PCR oligo pool | 2.5 |
| Sub-Total | 15.0 |

[0079] 2. Transfer reagents to PCR plate
[0080] a. Transfer 15 μL of master mix to each sample well in a PCR plate. Then, add 35 μL of cfDNA (total 30 ng) to the corresponding wells (Table 2).

TABLE 2

| Reagent | Volume (μL) |
|---|---|
| PCR master mix | 15.0 |
| cfDNA | 35.0 |
| Total | 50.0 |

[0081] 3. Seal and mix: Carefully seal the reactions and vortex for 10-15 seconds.

[0082] 4. Spin: Briefly spin the reactions to remove any air bubbles from the bottom of the wells and spin down droplets from the seal or side walls.

[0083] 5. Perform PCR: Perform the following program with the heated lid on (Table 3).

TABLE 3

| | | |
|---|---|---|
| Temp | Time | # of cycles |

| | | | |
|---|---|---|---|
| 95° C. | 15 | sec | 1 |
| 95° C. | 1 | min | 5 |
| 58° C. | 2 | mins | |
| 60° C. | 4 | mins | |
| 64° C. | 1 | min | |
| 72° C. | 1 | min | |
| 95° C. | 30 | sec | 21 |
| 66° C. | 3 | min | |

| | | |
|---|---|---|
| 8° C. | Hold | Hold |

### Example 1B. Purify the GS-PCR Product

[0084] Pre-Purification

[0085] Warm AMPure beads: Take out Agencourt AMPure XP beads from 4° C. and incubate at room temperature for at least 30 minutes before use.

[0086] GS-PCR Product Purification
[0087] 1. Briefly spin the samples to remove droplets from the side walls. Carefully remove the seal.
[0088] 2. Mix beads: Vortex AMPure XP beads thoroughly until all beads are well dispersed.
[0089] 3. Add beads: Add 75 μL beads to each well. Pipette the mixture up and down 10 times. If bubbles form on the bottom of the wells, briefly spin the samples and mix again.
[0090] 4. Bind PCR product to beads: Incubate the samples for 5 minutes at room temperature.
[0091] 5. Separate beads containing PCR product: Place the samples on a magnetic rack until the solution appears clear, which can take up to 5 minutes.
[0092] 6. Remove supernatant: Carefully remove the supernatant from each well without disturbing the beads from the wall of each well.
[0093] 7. Wash beads: Leave the samples on the magnetic rack. Add 150 μL of freshly prepared 70% ethanol to each well without disturbing the beads. Incubate 30 seconds, and then remove the supernatant from each well.
[0094] 8. Second wash: Repeat step 7 for a second 70% ethanol wash. Remove the supernatant from each well. The unused solution of ethanol can be used to purify the libraries after indexing PCR.
[0095] 9. Remove remaining ethanol wash: Remove trace amounts of ethanol completely from each well. Spin the samples in a benchtop centrifuge for 10-15 seconds, place the samples back on the magnetic rack, and use a 10 or 20 μL tip to remove the remaining ethanol solution at the bottom of the wells.
[0096] 10. Dry beads: Let the beads air dry at room temperature for 2-5 minutes.
[0097] 11. Resuspend beads: Remove the samples from the magnetic rack, and immediately resuspend the dried beads in each well using 32 μL nuclease-free water. Gently pipette the suspension up and down 10 times. If bubbles form on the bottom of the wells, briefly spin and mix again.
[0098] 12. Elute: Incubate the elution at room temperature for 5 minutes to fully elute the product.
[0099] 13. Separate supernatant containing PCR product: Place the samples on a magnetic rack until the solution appears clear, which can take up to 5 minutes.

### Example 2. Protocols for Indexing PCR

[0100] 1. Prepare a Master Mix: Vortex and spin the High-Fidelity PCR Master Mix before use. To prepare the PCR master mix, combine the High-Fidelity PCR Master Mix and water sufficient for the samples being processed with overage. Transfer 32 μL of master mix to each sample well in a PCR plate (Table 4).

TABLE 4

| Reagent | Volume (μL) |
|---|---|
| HiFi PCR Master Mix (4x) | 12.5 |
| Nuclease-free water | 19.5 |
| Total | 32.0 |

[0101] 2. Add indexing primers and purified GS-PCR product to each well:. Add 4 uL of each of the two indexing primers and 10 μL of the Ampure purified GS-PCR supernatant into the wells containing the PCR Master Mix, being sure that no beads are transferred (Table 5).

TABLE 5

| Reagent | Volume (μL) |
|---|---|
| Indices and PCR Master Mix | 32.0 |
| Pi700 Pillar Index | 4.0 |
| Pi500 Pillar Index | 4.0 |
| Purified Gene-specific PCR product | 10.0 |
| Total | 50.0 |

[0102] 3. Mix and spin: Seal the plates and pulse vortex the sealed reactions on a medium setting for 5-10 seconds to mix. Briefly spin down the reactions to remove any bubbles within the reaction solutions.
[0103] 4. Perform PCR: Perform the following program with the heated lid on (Table 6).

TABLE 6

| | | |
|---|---|---|
| Temperature | Time | Number of Cycles |

| | | | |
|---|---|---|---|
| 95° C. | 1 | min | 1 |
| 95° C. | 30 | sec | 5* |
| 66° C. | 30 | sec | |
| 72° C. | 60 | sec | |
| 72° C. | 5 | min | 1 |

| | | |
|---|---|---|
| 8° C. | Hold | 1 |

*This number can be varied.

### Example 3. Protocols for Purifying the Libraries

[0104] 1. Briefly spin the samples to remove any droplets from the side walls. Carefully remove the seal.
[0105] 2. Mix beads: Vortex the room temperature pre-warmed AMPure XP beads thoroughly until all beads are well dispersed.
[0106] 3. Add beads: Add 60 μL beads (1.2×beads) to each well. Pipette the mixture up and down 10 times. If bubbles form on the bottom of the wells, briefly spin and mix again.
[0107] 4. Bind libraries to beads: Incubate the samples for 5 minutes at room temperature to bind the libraries to the beads.
[0108] 5. Separate libraries on beads: Place the samples on a magnetic rack until the solution appears clear, which can take up to 5 minutes.
[0109] 6. Remove supernatant: Carefully remove the supernatant from each well without disturbing the beads from the wall of each well.
[0110] 7. Wash beads: Leave the samples on the magnetic rack. Add 150 μL of freshly prepared 70% ethanol to each well without disturbing the beads. Incubate 30 seconds, and then remove the supernatant from each well.
[0111] 8. Second wash: Repeat step 7 for a second 70% ethanol wash. Remove the supernatant from each well.
[0112] 9. Dry beads: Let the beads air dry at room temperature for 2-5 minutes.
[0113] 10. Resuspend beads: Remove the samples from the magnetic rack and resuspend the dried beads in each well using 32 μL nuclease-free water. Gently pipette the beads suspension up and down 10 times. If bubbles form on the bottom of the wells, briefly spin and mix again.
[0114] 11. Elute libraries: Incubate the resuspended beads at room temperature for 5 minutes to elute the final libraries.
[0115] 12. Separate libraries from beads: Place the elution on the magnetic rack at room temperature until the solution appears clear. Transfer 30 μL of clear supernatant from each well of the PCR plate or tubes to the corresponding well of a new plate or tube.
[0116] 13. Quantitation: Analyze an aliquot of each library according to Example 4.

### Example 4. Protocols for Qubit Quantitation of Purified Libraries

[0117] 1. Prepare buffer with dye: Dilute the Qubit dsDNA HS reagent 1:200 in Qubit dsDNA HS buffer. Vortex briefly to mix Qubit working solution. For example, 2000 μL is sufficient buffer for 10 readings (8 samples+2 standards). Combine 1990 μL of Qubit dsDNA HS buffer and 10 μL HS reagent. Add reagent overage appropriately
[0118] 2. Label tubes: Set up 0.5 mL Qubit tubes for standards and samples. Label the tube lids.
[0119] 3. Prepare standards: Transfer 190 μL of Qubit working solution into two tubes for standard 1 and standard 2, and then add 10 μL of each standard to the corresponding tube.
[0120] 4. Prepare samples: Transfer 198 μL of Qubit working solution to each tube, and then add 2 μL of each sample to the tube (1:100 dilution).
[0121] 5. Mix and spin: Mix the tubes by vortexing and then spinning the tubes briefly.
[0122] 6. Incubate the tubes at room temperature for 2 minutes.
[0123] 7. Measure concentration: Measure the concentration of each sample on the Qubit 2.0 Fluorometer per the Qubit User Guide. Use the dsDNA High Sensitivity assay to read standards 1 and 2 followed by the samples.
[0124] 8. If any sample concentrations are above the linear range of the instrument, prepare a new dilution using 199 μL Qubit buffer with dye and 1 μL sample (1:200 dilution). Repeat steps 5-7.
[0125] 9. Calculate concentration: 1 ng/μL of library is equal to 7 nM. Example calculation is below. Adjust dilution factor accordingly. 2 uL of library+198 uL qubit solution:

$$\frac{\text{?} reading ( \frac{ng}{mL} )}{1 , 000} \times dilution factor ( 100 ) \times conversion factor ( 7 ) \text{?}$$

$$\text{?} \text{indicates text missing or illegible when filed}$$

### Example 5. Protocols for Normalization and Pooling

[0126] 1. Normalize libraries to 5 nM: Dilute an aliquot (i.e. 4 μL) of each sample library to 5 nM using nuclease-free water or 10 mM Tris-Cl with 0.1% Tween-20, pH 8.5. An example calculation is as follows:

$$\frac{Library concentration \text{?} library}{\text{?}} \text{?} final volume of library$$

$$Final volume of library - 4 \text{?} library \text{?}$$

$$\text{?} \text{indicates text missing or illegible when filed}$$

[0127] 2. Mix and spin: Mix the 5 nM libraries thoroughly by vortexing followed by spinning briefly.
[0128] 3. Prepare library mix: Label a new 1.5 mL microtube for the library mix. Prepare a 5 nM mixture of libraries by combining each library at equal volume (i.e. mixing 5 μL of each 5 nM library). Gently pipette the entire solution up and down 10 times to mix thoroughly. The mixture can also be quickly vortexed and spun.
[0129] 4. Quantify library pool (recommended): It is recommended that the library mix be quantitated using Qubit or another library quantitation method (qPCR) to ensure the mix is at 5 nM (±10%) to prevent over- or under-clustering on the MiSeq. If the final dilution is not 5 nM (±10%), adjust the dilution for loading the sequencer accordingly to obtain the desired concentration.

### Example 6. Protocols for Preparing Diluted Libraries for Sequencing

[0130] Samples can be multiplexed and sequenced on the MiSeq using the v3 chemistry or the NextSeq. The number of samples that can be loaded is dependent on the number of paired-end reads per sample and sequencing depths that required.

[0131] The maximum number of samples that can be loaded on each kit is displayed in a table. Choose the appropriate sequencing workflow and kit based on the number of samples to be sequenced.

### Sequencing on MiSeq (MiSeq v3 Kit)

[0132] For v3 chemistry (MiSeq v3 kit), dilute libraries to 5 nM. The final concentration of the libraries for sequencing is 20 pM.

[0133] 1. Prepare 0.2 N NaOH: Label a new 1.5 mL microtube for 0.2 N NaOH. Prepare the NaOH by combining 800 μL nuclease-free water with 200 μL of 1 N NaOH. Vortex the solution to mix.
[0134] Alternately, prepare a 1 N NaOH solution by combining 500 μL 10 N NaOH into 4.5 mL of nuclease-free water. Vortex the solution to mix. If 1 N NaOH has not been prepared within the last week from a 10 N solution, prepare a new 1 N NaOH solution.

[0135] 2. Denature the library mix: Label a new 1.5 mL microtube for the denatured, 20 pM library mix.
[0136] a. Denature the library mix by combining 5 μL of the library mix and 5 μL of the freshly prepared 0.2 N NaOH.
[0137] b. Vortex the solution thoroughly for 10 seconds and centrifuge the solution in a microfuge for 1 minute.
[0138] c. Let the solution stand at room temperature for 5 minutes.
[0139] d. Add 990 μL of Illumina's HT1 solution to the denatured library mix.
[0140] e. Invert the mixture several times, spin briefly, and place on ice.

[0141] 3. Dilute to 20 pM library mix: Label a new 1.5 mL microtube for the 20 pM library mix. Combine 480 μL of the 25 pM library mix (step 5) with 120 μL of Illumina's HT1 solution. Adjust the volumes as needed for libraries that are over or under 25 pM. Invert the mixture several times, spin briefly, and place on ice.

[0142] 4. Combine library mix and PhiX control: Label a new 1.5 mL microtube for the mixture that will be loaded. Combine 594 μL of the 20 pM library mix (step 6) with 6 μL of a 20 pM PhiX library control. Briefly vortex, spin, and place on ice.

[0143] 5. Load MiSeq cartridge: Using a clean 1000 μL tip, puncture the foil cap above the sample loading tube on the MiSeq cartridge. Load the 600 μL library mix and PhiX mixture (step 7) into the cartridge and ensure the solution has reached the bottom of the tube by lightly tapping the tube if liquid remains on the side wall or if there is an air bubble at the to bottom of the tube.

[0144] 6. Run the MiSeq: Run the libraries on the MiSeq per the manufacturer's instructions using a paired-end read length of 75 (75) and two indexing reads of 8 cycles each: “MiSeq System User Guide”

[0145] 7. Store diluted libraries and mixtures at −20° C. for long-term storage.

### Sequencing on the NextSeq

[0146] For sequencing on the NextSeq, dilute libraries to 5 nM. The final concentration of the libraries for sequencing is 1.8 pM.
[0147] 1. Prepare 0.2 N NaOH: Label a new 1.5 mL microtube for 0.2 N NaOH. Prepare the NaOH by combining 800 μL nuclease-free water with 200 μL of 1 N NaOH. Vortex the solution to mix.

[0148] Alternately, prepare a 1 N NaOH solution by combining 500 μL 10 N NaOH into 4.5 mL of nuclease-free water. Vortex the solution to mix. If 1 N NaOH has not been prepared within the last week from a 10 N solution, prepare a new 1 N NaOH solution.
[0149] 2. Denature the library mix: Label a new microtube for the denatured, 25 pM library mix.
   [0150] a. Denature the library mix by combining 5 μL of the library mix and 5 μL of the freshly prepared 0.2 N NaOH.
   [0151] b. Vortex the solution thoroughly for 10 seconds and centrifuge the solution in a microfuge for 1 minute.
   [0152] c. Let the solution stand at room temperature for 5 minutes.
   [0153] d. Add 5 μL of 200 mM Tris-HCl, pH 7.0.
   [0154] e. Vortex briefly and centrifuge the solution in a microfuge for 1 minute.
   [0155] f. Add 985 μL of Illumina's HT1 solution to the denatured library mix.
   [0156] g. Vortex briefly and centrifuge the solution in a microfuge for 1 minute.
[0157] 3. Dilute 25 pM library mix to 1.8 pM: Dilute the denatured library to 1400 μL of a 1.8 pM solution by combining 101 μL of the 25 pM denatured library mix with 1299 μL of Illumina's HT1 solution. Invert to mix and spin briefly.
[0158] 4. Combine library mix and PhiX control: Label a new 1.5 mL microtube for the mixture that will be loaded. Combine 1287 μL of the 1.8 pM library mix (step 3) with 13 μL of a 1.8 pM PhiX library control. Briefly vortex, spin, and place on ice.
[0159] 5. Load NextSeq cartridge: Using a clean 1000 μL tip, puncture the foil cap above the sample loading well on the NextSeq cartridge. Load 1300 μL library mix and PhiX mixture (step 4) into the cartridge and ensure the solution has reached the bottom of the cartridge well.
[0160] 6. Run the NextSeq: Run the libraries on the NextSeq per the manufacturer's instructions using a paired-end read length of 75 (2×75) and two indexing reads of 8 cycles each: “NextSeq System User Guide”.
[0161] 7. Store Libraries: Store diluted libraries and mixtures at −20° C. for long-term storage.

### Example 7. Detecting Somatic Mutations in ctDNA Reference Material

[0162] Seraseq™ ctDNA Reference Material was obtained from SeraCare and was used to prepare cfDNA samples for testing in this example. Seraseq ctDNA Reference Material consists of DNA purified from a reference cell line, GM24385, plus constructs containing variants mixed at a defined allele frequency. Processing of the purified DNA produces an average DNA fragment size of approximately 170 base pairs. Somatic mutations present in Seraseq™ ctDNA Reference Material are in gene ID AKT1, APC, ATM, BRAF, CTNNB1, EGFR, ERBB2, FGFR3, FLT3, FOXL2, GNA11, GNAQ, GNAS, IDH1, JAK2, KIT, KRAS, MPL, NCOA4-RET, NPM1, NRAS/CSDE1, PDGFRA, PIK3CA, PTEN, RET, SMAD4, TP53, and TPR-ALK. Most of the targets in this Reference Material are not on the same gene and do not have overlapping regions, and therefore, SLIMAMP® tag is not used in the primer design.

[0163] 21 genomic loci were selected to cover hot spots in common cancer related genes in the Seraseq™ ctDNA reference material by the Pillar PIVAT® software for the liquid biopsy monitoring panel.

[0164] A 21-plex customized panel of primer pairs targeting 21 specific genomic loci of the SeraCare reference material in a single multiplex reaction was designed by the Pillar AmpPD software, and manufactured at IDT. The target-specific sequences (without tag) of the 21 primer pairs and their target Gene ID are shown Table 7 below.

TABLE 7

| | Target-Specific | Target-Specific |
|---|---|---|
| | Forward Primer Sequence | Reverse Primer Sequence |
| Gene ID | SEQ ID NO | SEQ ID NO |
| MPL | GGCCTCAGCGCCGTCCT 1 | GCGGTACCTGTAGTGTGCA 2 |
| PTEN | AGTTCATGTACTTTGAGTTCCCTCA 3 | AGAACTCTACTTTGATATCACCACACA |
| | | 4 |
| ATM | GTCAAAGAAAATTTGATTGAATTGATGGCA | GTGACATGACCTACTTACTGTACC |
| | 5 | 6 |
| FLT3 | CTGACAACATAGTTGGAATCACTCA 7 | AGTGGTGAAGATATGTGACTTTGGA 8 |
| SMAD4 | AGGCGGCTACTGCACAAG 9 | TGGGCCAGGGATGTTTCCT 10 |
| GNAH | GTCCTTTCAGGATGGTGGATGT 11 | AGCAGTGGATCCACTTCCTC 12 |
| IDH1 | GCCAACATGACTTACTTGATCCC 13 | TGAGTGGATGGGTAAAACCTATCA 14 |
| GNAS | TTTCAGGACCTGCTTCGCT 15 | CCACCTGGAACTTGGTCTCAAA 16 |
| CTNNB1 | GGACTCTGGAATCCATTCTGGT 17 | CCTCAGGATTGCCTTTACCACT 18 |
| FOXL2 | GTAGTTGCCCTTCTCGAACATG 19 | CGCAAGGGCAACTACTGGA 20 |
| PIK3CA | CACGAGATCCTCTCTCTGAAATCA 21 | GCACTTACCTGTGACTCCATAGA 22 |
| PIK3CA | GGCTTTGGAGTATTTCATGAAACAAATG 23 | ATCCATTTTTGTTGTCCAGCCA 24 |
| PIK3CA | GATCTTCCACACAATTAAACAGCATG | GAGTGAGCTTTCATTTTCTCAGTTATCT |
| | 25 | 26 |
| FGFR3 | GGGTGGCCCCTGAGCGT 27 | AGCCCCGCCTGCAGGAT 28 |
| PDGFRA | TCGCTGGAGGGTCATTGAAT 29 | GCTGCATCGGGTCCACATAA 30 |
| PDGFRA | GAAAAATTGTGAAGATCTGTGACTTTGG 31 | GACACATAGTTCGAATCATGCATGA 32 |
| APC | CTCCACCACCTCCTCAAACA | GCAGTAGGTGCTTTATTTTTAGGTACTT |
| | 33 | 34 |
| EGFR | TCCAGGAAGCCTACGTGATG 35 | CCAGCAGGCGGCACACG 36 |
| EGFR | GCAGCATGTCAAGATCACAGATT 37 | TTCTTTCTCTTCCGCACCCA 38 |
| JAK2 | GCTTTCTCACAAGCATTTGGTTTT 39 | AGTTTTACTTACTCTCGTCTCCACA 40 |
| GNAQ | GTGTATCCATTTTCTTCTCTCTGACC 41 | AGTATTGTTAACCTTGCAGAATGGTC |
| | | 42 |

[0165] SERASEQ™ ctDNA Reference Material with 0.5% variant allele frequency was serial diluted 2.5, 5, 10, 20, and 40-fold in normal cfNDA from healthy donor to prepare cfDNA samples for testing; the expected allele frequencies (AF) are shown in FIG. 7 as 0.5, 0.2, 0.1, 0.05, 0.25, and 0.0125%, respectively. Each diluted sample was tested in duplicated.

[0166] All of 42 primers (21 pairs) were mixed into a single oligonucleotide pool and were added into a gene-specific PCR reaction with PCR polymerase, dNTP and buffer to amplify the 21 selected loci in 30 ng of DNA in each sample.

[0167] After Ampure beads purification, indexing PCR, a second Ampure beads purification, and quantitation and normalization, the libraries were sequenced on an Illumina NextSeq. The sequencing raw data were demuliplexed and converted to FASTQ by BCL2FASTQ, the subsequent FASTQ files were analyzed by the PIVAT® software. At least two out of 21 loci should be detected to call MRD-positive of a cfDNA sample. The results are shown in FIG. 7.

[0168] In this example, the detection sensitivity was as high as 0.0125% in expected AF, in which at least two loci were detected.

### Example 8. Designing Amplicon Panel Targeting Genomic Loci of Lung Panel

[0169] As a demonstrable example for off-the-shelf bank panels of the present invention, FIG. 8 shows a 1,688-amplicon panel targeting 7,118 unique variants. These variants were selected to design a lung cancer panel and they are estimated to target˜80% of the patients based on publicly available cancer genomics databases, such as The Cancer Genome Atlas (TCGA).

[0170] The target specific-primer pairs for each locus of interest (FIG. 8) were designed and identified using the procedures described in this application and VERSATILE® software (Pillar Biosciences, Inc.).

[0171] FIG. 8 shows a 1,688-primer panel targeting 7,118 unique variants of a lung cancer panel. All forward and reverse primers shown in FIG. 8 are target gene-specific primers without tags.

[0172] In the primer panel of FIG. 8, some amplicon regions have overlapping regions. Preferably, SLIMAMP® tags are added to inhibit the amplification of the overlapping target segments. FIG. 9 illustrates SLIMAMP® tags of 3 pairs of overlapping target genomic loci in FIG. 8. SLIMAMP® tag is added at the 5′-end of the first reverse primer of each pair. SLIMAMP® tag is a partial sequence of the 5′-end sequence of the second forward primer of each pair.

### Example 9. Protocol for Selecting Patient-Specific Primer Pairs Using WES Data

[0173] WES data of tumor and matched normal from 2 individuals A and B were processed and sequenced in-house. The DNA was extracted from blood (normal) and formalin-fixed paraffin-embedded (FFPE) tumor tissues obtained from the two patients. WES data was generated by using Roche's HyperCap workflow for exome captured followed by sequencing on Illumina's NextSeq machine. The sequencing raw data were demultiplexed and converted to FASTQ by BCL2FASTQ. The subsequent FASTQ files were subjected to quality-based filtering, removing reads with average Phred-based quality of less than 15 and read length of less than 75 bp. The filtered FASTQ files were mapped to the human genome reference (hg19) using BWA and the alignment was post-processed using sambamba and summarized using custom written Python scripts. All variants were identified from the paired WES data using VarDict software (Pillar Biosciences, Inc.). Variants that are strongly or likely somatic in origin are then inferred by comparing the tumor variant calls with normal variant calls using the var2vcf_paired.pl script from the VarDict package. A series of optional parameters are applied to select the somatic variants based on VAF and sequencing quality. This resulted in 2-5 patient-specific somatic variants of interest (VOI) which are then used to identify 2-5 genomic loci.

[0174] For the 2 patient samples A and B, Table 8 shows the number of mutations identified in each patient and the mutations within that patient.

TABLE 8

| | Number of final | |
|---|---|---|
| Patient | somatic mutations | List of somatic mutations |
| Patient A | 2 | ATM 1010G > A.Arg337His |
| | | KRAS 35G > A.Gly12Asp |
| Patient B | 5 | OR4D5 373G > A.Ala125Thr |
| | | TP53 810T > A.Phe270Leu |
| | | ZNF536 3699G > C.Trp1233Cys |
| | | ZNF804A 2461C > A.Pro821Thr |
| | | COL19A1 358T > G.Trp120Gly |

[0175] We then used the amplicon bank of Example 8 with the filtered somatic mutations to select the following patient specific primer pairs as shown in Table 9.

TABLE 9

| | | Target-Specific | Target-Specific | |
|---|---|---|---|---|
| | | Forward Primer Sequence | Forward Primer Sequence | Somatic mutations |
| Pat | Gene ID | (SEQ ID NO) | (SEQ ID NO) | covered |
| A | ATM | GAAGTAGAGGAAAGTAT | GTGACAGATATCTGC | 1010G>A.Arg337His |
| | | TCTTCAGGATTT 3227 | CATCAATTCAAT 3228 | |
| A | KRAS | ATCATATTCGTCCACAAA | TTTATTATAAGGCCTG | 35G>A.Gly12Asp |
| | | ATGATTCTGAATT 1957 | CTGAAAATGACTGA 1958 | |
| B | OR4D5 | TGACTGTCATGGCGTATG | GTGCACAGACAGTCTG | 373G>A.Ala125Thr |
| | | ACC 1409 | ATTCAT 1410 | |
| B | TP53 | CCCTTTCTTGCGGAGATT | CTTACTGCCTCTTGCTTC | 810T>A.Phe270Leu |
| | | C 399 | TCTTT 400 | |
| B | ZNF536 | AGGGACTGGTCTCACCT | CGCTCCGGCTTTGGCAG 70 | 3699G>C.Trp1233Cys |
| | | TTA 69 | | |
| B | ZNF804A | TTGAGGCCACCAAGTACTT | GGGATAATCTGTATTTTC | 2461C>A.Pro821Thr |
| | | CAGTT 43 | TTTGAGTTCTAA 44 | |
| B | COL19A1 | TAGCTGCCATGTTTCGAGT | CACAACTCTAATGGTACT | 358T>G.Trp120Gly |
| | | ACG 2819 | TTACCTGTG 2820 | |

[0176] The invention, and the manner and process of making and using it, are now described in such full, clear, concise and exact terms as to enable any person skilled in the art to which it pertains, to make and use the same. It is to be understood that the foregoing describes preferred embodiments of the present invention and that modifications may be made therein without departing from the scope of the present invention as set forth in the claims. To particularly point to out and distinctly claim the subject matter regarded as invention, the following claims conclude the specification.

The application's sequence listing, which the Patent Office published only in electronic form, follows.

SEQUENCE LISTING (3418 sequences)

SEQ ID NO: 1 - DNA, 17 bp, synthetic construct
  misc_feature 1..17: note = Synthetic: MPL forward primer
  source 1..17: mol_type = other DNA
ggcctcagcgccgtcct

SEQ ID NO: 2 - DNA, 19 bp, synthetic construct
  misc_feature 1..19: note = Synthetic: MPL reverse primer
  source 1..19: mol_type = other DNA
gcggtacctgtagtgtgca

SEQ ID NO: 3 - DNA, 25 bp, synthetic construct
  misc_feature 1..25: note = Synthetic: PTEN forward primer
  source 1..25: mol_type = other DNA
agttcatgtactttgagttccctca

SEQ ID NO: 4 - DNA, 27 bp, synthetic construct
  misc_feature 1..27: note = Synthetic: PTEN reverse primer
  source 1..27: mol_type = other DNA
agaactctactttgatatcaccacaca

SEQ ID NO: 5 - DNA, 30 bp, synthetic construct
  misc_feature 1..30: note = Synthetic: ATM forward primer
  source 1..30: mol_type = other DNA
gtcaaagaaaatttgattgaattgatggca

SEQ ID NO: 6 - DNA, 24 bp, synthetic construct
  misc_feature 1..24: note = Synthetic: ATM reverse primer
  source 1..24: mol_type = other DNA
gtgacatgacctacttactgtacc

SEQ ID NO: 7 - DNA, 25 bp, synthetic construct
  misc_feature 1..25: note = Synthetic: FLT3 forward primer
  source 1..25: mol_type = other DNA
ctgacaacatagttggaatcactca

SEQ ID NO: 8 - DNA, 25 bp, synthetic construct
  misc_feature 1..25: note = Synthetic: FLT3 reverse primer
  source 1..25: mol_type = other DNA
agtggtgaagatatgtgactttgga

SEQ ID NO: 9 - DNA, 18 bp, synthetic construct
  misc_feature 1..18: note = Synthetic: SMAD4 forward primer
  source 1..18: mol_type = other DNA
aggcggctactgcacaag

SEQ ID NO: 10 - DNA, 19 bp, synthetic construct
  misc_feature 1..19: note = Synthetic: SMAD4 reverse primer
  source 1..19: mol_type = other DNA
tgggccagggatgtttcct

SEQ ID NO: 11 - DNA, 22 bp, synthetic construct
  misc_feature 1..22: note = Synthetic: GNA11 forward primer
  source 1..22: mol_type = other DNA
gtcctttcaggatggtggatgt

SEQ ID NO: 12 - DNA, 20 bp, synthetic construct
  misc_feature 1..20: note = Synthetic: GNA11 reverse primer
  source 1..20: mol_type = other DNA
agcagtggatccacttcctc

SEQ ID NO: 13 - DNA, 23 bp, synthetic construct
  misc_feature 1..23: note = Synthetic: IDH1 forward primer
  source 1..23: mol_type = other DNA
gccaacatgacttacttgatccc

SEQ ID NO: 14 - DNA, 24 bp, synthetic construct
  misc_feature 1..24: note = Synthetic: IDH1 reverse primer
  source 1..24: mol_type = other DNA
tgagtggatgggtaaaacctatca

SEQ ID NO: 15 - DNA, 19 bp, synthetic construct
  misc_feature 1..19: note = Synthetic: GNAS forward primer
  source 1..19: mol_type = other DNA
tttcaggacctgcttcgct

SEQ ID NO: 16 - DNA, 22 bp, synthetic construct
  misc_feature 1..22: note = Synthetic: GNAS reverse primer
  source 1..22: mol_type = other DNA
ccacctggaacttggtctcaaa

SEQ ID NO: 17 - DNA, 22 bp, synthetic construct
  misc_feature 1..22: note = Synthetic: CTNNB1 forward primer
  source 1..22: mol_type = other DNA
ggactctggaatccattctggt

SEQ ID NO: 18 - DNA, 22 bp, synthetic construct
  misc_feature 1..22: note = Synthetic: CTNNB1 reverse primer
  source 1..22: mol_type = other DNA
cctcaggattgcctttaccact

SEQ ID NO: 19 - DNA, 22 bp, synthetic construct
  misc_feature 1..22: note = Synthetic: FOXL2 forward primer
  source 1..22: mol_type = other DNA
gtagttgcccttctcgaacatg

SEQ ID NO: 20 - DNA, 19 bp, synthetic construct
  misc_feature 1..19: note = Synthetic: FOXL2 reverse primer
  source 1..19: mol_type = other DNA
cgcaagggcaactactgga

SEQ ID NO: 21 - DNA, 24 bp, synthetic construct
  misc_feature 1..24: note = Synthetic: PIK3CA forward primer
  source 1..24: mol_type = other DNA
cacgagatcctctctctgaaatca

SEQ ID NO: 22 - DNA, 23 bp, synthetic construct
  misc_feature 1..23: note = Synthetic: PIK3CA reverse primer
  source 1..23: mol_type = other DNA
gcacttacctgtgactccataga

SEQ ID NO: 23 - DNA, 28 bp, synthetic construct
  misc_feature 1..28: note = Synthetic: PIK3CA forward primer
  source 1..28: mol_type = other DNA
ggctttggagtatttcatgaaacaaatg

SEQ ID NO: 24 - DNA, 22 bp, synthetic construct
  misc_feature 1..22: note = Synthetic: PIK3CA reverse primer
  source 1..22: mol_type = other DNA
atccatttttgttgtccagcca

SEQ ID NO: 25 - DNA, 26 bp, synthetic construct
  misc_feature 1..26: note = Synthetic: PIK3CA forward primer
  source 1..26: mol_type = other DNA
gatcttccacacaattaaacagcatg

SEQ ID NO: 26 - DNA, 28 bp, synthetic construct
  misc_feature 1..28: note = Synthetic: PIK3CA reverse primer
  source 1..28: mol_type = other DNA
gagtgagctttcattttctcagttatct

SEQ ID NO: 27 - DNA, 17 bp, synthetic construct
  misc_feature 1..17: note = Synthetic: FGFR3 forward primer
  source 1..17: mol_type = other DNA
gggtggcccctgagcgt

SEQ ID NO: 28 - DNA, 17 bp, synthetic construct
  misc_feature 1..17: note = Synthetic: FGFR3 reverse primer
  source 1..17: mol_type = other DNA
agccccgcctgcaggat

SEQ ID NO: 29 - DNA, 20 bp, synthetic construct
  misc_feature 1..20: note = Synthetic: PDGFRA forward primer
  source 1..20: mol_type = other DNA
tcgctggagggtcattgaat

SEQ ID NO: 30 - DNA, 20 bp, synthetic construct
  misc_feature 1..20: note = Synthetic: PDGFRA reverse primer
  source 1..20: mol_type = other DNA
gctgcatcgggtccacataa

SEQ ID NO: 31 - DNA, 28 bp, synthetic construct
  misc_feature 1..28: note = Synthetic: PDGFRA forward primer
  source 1..28: mol_type = other DNA
gaaaaattgtgaagatctgtgactttgg

SEQ ID NO: 32 - DNA, 25 bp, synthetic construct
  misc_feature 1..25: note = Synthetic: PDGFRA reverse primer
  source 1..25: mol_type = other DNA
gacacatagttcgaatcatgcatga

SEQ ID NO: 33 - DNA, 20 bp, synthetic construct
  misc_feature 1..20: note = Synthetic: APC forward primer
  source 1..20: mol_type = other DNA
ctccaccacctcctcaaaca

SEQ ID NO: 34 - DNA, 28 bp, synthetic construct
  misc_feature 1..28: note = Synthetic: APC reverse primer
  source 1..28: mol_type = other DNA
gcagtaggtgctttatttttaggtactt

SEQ ID NO: 35 - DNA, 20 bp, synthetic construct
  misc_feature 1..20: note = Synthetic: EGFR forward primer
  source 1..20: mol_type = other DNA
tccaggaagcctacgtgatg

SEQ ID NO: 36 - DNA, 17 bp, synthetic construct
  misc_feature 1..17: note = Synthetic: EGFR reverse primer
  source 1..17: mol_type = other DNA
ccagcaggcggcacacg

SEQ ID NO: 37 - DNA, 23 bp, synthetic construct
  misc_feature 1..23: note = Synthetic: EGFR forward primer
  source 1..23: mol_type = other DNA
gcagcatgtcaagatcacagatt

SEQ ID NO: 38 - DNA, 20 bp, synthetic construct
  misc_feature 1..20: note = Synthetic: EGFR reverse primer
  source 1..20: mol_type = other DNA
ttctttctcttccgcaccca

SEQ ID NO: 39 - DNA, 24 bp, synthetic construct
  misc_feature 1..24: note = Synthetic: JAK2 forward primer
  source 1..24: mol_type = other DNA
gctttctcacaagcatttggtttt

SEQ ID NO: 40 - DNA, 25 bp, synthetic construct
  misc_feature 1..25: note = Synthetic: JAK2 reverse primer
  source 1..25: mol_type = other DNA
agttttacttactctcgtctccaca

SEQ ID NO: 41 - DNA, 26 bp, synthetic construct
  misc_feature 1..26: note = Synthetic: GNAQ forward primer
  source 1..26: mol_type = other DNA
gtgtatccattttcttctctctgacc

SEQ ID NO: 42 - DNA, 26 bp, synthetic construct
  misc_feature 1..26: note = Synthetic: GNAQ reverse primer
  source 1..26: mol_type = other DNA
agtattgttaaccttgcagaatggtc

SEQ ID NO: 43 - DNA, 24 bp, synthetic construct
  misc_feature 1..24: note = Synthetic: ZNF804A forward primer
  source 1..24: mol_type = other DNA
ttgaggccaccaagtacttcagtt

SEQ ID NO: 44 - DNA, 30 bp, synthetic construct
  misc_feature 1..30: note = Synthetic: ZNF804A reverse primer
  source 1..30: mol_type = other DNA
gggataatctgtattttctttgagttctaa

SEQ ID NO: 45 - DNA, 18 bp, synthetic construct
  misc_feature 1..18: note = Synthetic: ZNF804A forward primer
  source 1..18: mol_type = other DNA
gattccaccccggatttg

SEQ ID NO: 46 - DNA, 29 bp, synthetic construct
  misc_feature 1..29: note = Synthetic: ZNF804A reverse primer
  source 1..29: mol_type = other DNA
atccagaggatttaaggaagaattgtctt

SEQ ID NO: 47 - DNA, 21 bp, synthetic construct
  misc_feature 1..21: note = Synthetic: ZNF804A forward primer
  source 1..21: mol_type = other DNA
cagctgcaggaacctttaaag

SEQ ID NO: 48 - DNA, 24 bp, synthetic construct
  misc_feature 1..24: note = Synthetic: ZNF804A reverse primer
  source 1..24: mol_type = other DNA
agagctgaggtaatgaggttctgg

SEQ ID NO: 49 - DNA, 32 bp, synthetic construct
  misc_feature 1..32: note = Synthetic: ZNF595 forward primer
  source 1..32: mol_type = other DNA
cacaactagttctctgatttcacttatagtca

SEQ ID NO: 50 - DNA, 17 bp, synthetic construct
  misc_feature 1..17: note = Synthetic: ZNF595 reverse primer
  source 1..17: mol_type = other DNA
ggcagggtccagacatt

SEQ ID NO: 51 - DNA, 24 bp, synthetic construct
  misc_feature 1..24: note = Synthetic: ZNF595 forward primer
  source 1..24: mol_type = other DNA
agaattctcccctgaagagtggaa

SEQ ID NO: 52 - DNA, 22 bp, synthetic construct
  misc_feature 1..22: note = Synthetic: ZNF595 reverse primer
  source 1..22: mol_type = other DNA
ggagaccaggttcctgtagttc

SEQ ID NO: 53 - DNA, 24 bp, synthetic construct
  misc_feature 1..24: note = Synthetic: ZNF585A forward primer
  source 1..24: mol_type = other DNA
gccacagttactgcactcatatgg

SEQ ID NO: 54 - DNA, 20 bp, synthetic construct
  misc_feature 1..20: note = Synthetic: ZNF585A reverse primer
  source 1..20: mol_type = other DNA
tgaatgcggacaggccttca

SEQ ID NO: 55 - DNA, 23 bp, synthetic construct
  misc_feature 1..23: note = Synthetic: ZNF585A forward primer
  source 1..23: mol_type = other DNA
gcaatcaaatgggtcttctggat

SEQ ID NO: 56 - DNA, 23 bp, synthetic construct
  misc_feature 1..23: note = Synthetic: ZNF585A reverse primer
  source 1..23: mol_type = other DNA
acacaaaagtccacactcaagat

SEQ ID NO: 57 - DNA, 19 bp, synthetic construct
  misc_feature 1..19: note = Synthetic: ZNF560 forward primer
  source 1..19: mol_type = other DNA
tcagtgaaggctttcccac

SEQ ID NO: 58 - DNA, 28 bp, synthetic construct
  misc_feature 1..28: note = Synthetic: ZNF560 reverse primer
  source 1..28: mol_type = other DNA
aaagctttcactaagtgctcatatctta

SEQ ID NO: 59 - DNA, 20 bp, synthetic construct
  misc_feature 1..20: note = Synthetic: ZNF560 forward primer
  source 1..20: mol_type = other DNA
gtgttcgtaaatgtttggta

SEQ ID NO: 60 - DNA, 24 bp, synthetic construct
  misc_feature 1..24: note = Synthetic: ZNF560 reverse primer
  source 1..24: mol_type = other DNA
tgtcttcgtattcacatgcgaact

SEQ ID NO: 61 - DNA, 22 bp, synthetic construct
  misc_feature 1..22: note = Synthetic: ZNF556 forward primer
  source 1..22: mol_type = other DNA
ccttcaggtgtcagaaatcctt

SEQ ID NO: 62 - DNA, 21 bp, synthetic construct
  misc_feature 1..21: note = Synthetic: ZNF556 reverse primer
  source 1..21: mol_type = other DNA
taggctttcccacactgcttg

SEQ ID NO: 63 - DNA, 19 bp, synthetic construct
  misc_feature 1..19: note = Synthetic: ZNF536 forward primer
  source 1..19: mol_type = other DNA
aacaagtcccccagcgacc

SEQ ID NO: 64 - DNA, 18 bp, synthetic construct
  misc_feature 1..18: note = Synthetic: ZNF536 reverse primer
  source 1..18: mol_type = other DNA
ctttgtccggggtcatga

SEQ ID NO: 65 - DNA, 20 bp, synthetic construct
  misc_feature 1..20: note = Synthetic: ZNF536 forward primer
  source 1..20: mol_type = other DNA
gctgctgtctcccatctcca

SEQ ID NO: 66 - DNA, 20 bp, synthetic construct
  misc_feature 1..20: note = Synthetic: ZNF536 reverse primer
  source 1..20: mol_type = other DNA
attgaggcatcccaggaggg

SEQ ID NO: 67 - DNA, 18 bp, synthetic construct
  misc_feature 1..18: note = Synthetic: ZNF536 forward primer
  source 1..18: mol_type = other DNA
ggagggggacaagcactc

SEQ ID NO: 68 - DNA, 21 bp, synthetic construct
  misc_feature 1..21: note = Synthetic: ZNF536 reverse primer
  source 1..21: mol_type = other DNA
ctcgatgcagctggatttcag

SEQ ID NO: 69 - DNA, 20 bp, synthetic construct
  misc_feature 1..20: note = Synthetic: ZNF536 forward primer
  source 1..20: mol_type = other DNA
agggactggtctcaccttta

SEQ ID NO: 70 - DNA, 17 bp, synthetic construct
  misc_feature 1..17: note = Synthetic: ZNF536 reverse primer
  source 1..17: mol_type = other DNA
cgctccggctttggcag

SEQ ID NO: 71 - DNA, 19 bp, synthetic construct
  misc_feature 1..19: note = Synthetic: ZNF536 forward primer
  source 1..19: mol_type = other DNA
tcttctccaagcccaggac

SEQ ID NO: 72 - DNA, 21 bp, synthetic construct
  misc_feature 1..21: note = Synthetic: ZNF536 reverse primer
  source 1..21: mol_type = other DNA
atcagaactgtaggccctgag

SEQ ID NO: 73 - DNA, 19 bp, synthetic construct
  misc_feature 1..19: note = Synthetic: ZNF536 forward primer
  source 1..19: mol_type = other DNA
ccgcaagaaccgcaagtac

SEQ ID NO: 74 - DNA, 19 bp, synthetic construct
  misc_feature 1..19: note = Synthetic: ZNF536 reverse primer
  source 1..19: mol_type = other DNA
ggcacttgaagggcttctc

SEQ ID NO: 75 - DNA, 17 bp, synthetic construct
  misc_feature 1..17: note = Synthetic: ZNF536 forward primer
  source 1..17: mol_type = other DNA
tgcacatgcgcacgcac

SEQ ID NO: 76 - DNA, 17 bp, synthetic construct
  misc_feature 1..17: note = Synthetic: ZNF536 reverse primer
  source 1..17: mol_type = other DNA
ttctgcgccgccctgtg

SEQ ID NO: 77 - DNA, 17 bp, synthetic construct
  misc_feature 1..17: note = Synthetic: ZNF536 forward primer
  source 1..17: mol_type = other DNA
cacctgcggacccacaa

SEQ ID NO: 78 - DNA, 17 bp, synthetic construct
  misc_feature 1..17: note = Synthetic: ZNF536 reverse primer
  source 1..17: mol_type = other DNA
agcaggcggttctcctc

SEQ ID NO: 79 - DNA, 17 bp, synthetic construct
  misc_feature 1..17: note = Synthetic: ZNF536 forward primer
  source 1..17: mol_type = other DNA
ggggcgtgggcgtgtgc

SEQ ID NO: 80 - DNA, 18 bp, synthetic construct
  misc_feature 1..18: note = Synthetic: ZNF536 reverse primer
  source 1..18: mol_type = other DNA
agcaggctgcctttcagc

SEQ ID NO: 81 - DNA, 18 bp, synthetic construct
  misc_feature 1..18: note = Synthetic: ZNF536 forward primer
  source 1..18: mol_type = other DNA
gccacatccgcatcttgc

SEQ ID NO: 82 - DNA, 17 bp, synthetic construct
  misc_feature 1..17: note = Synthetic: ZNF536 reverse primer
  source 1..17: mol_type = other DNA
ctcgccaccgccgttgg

SEQ ID NO: 83 - DNA, 20 bp, synthetic construct
  misc_feature 1..20: note = Synthetic: ZNF536 forward primer
  source 1..20: mol_type = other DNA
atcagccacgtggagaaggc

SEQ ID NO: 84 - DNA, 18 bp, synthetic construct
  misc_feature 1..18: note = Synthetic: ZNF536 reverse primer
  source 1..18: mol_type = other DNA
cctggctgaacacctgac

SEQ ID NO: 85 - DNA, 21 bp, synthetic construct
  misc_feature 1..21: note = Synthetic: ZNF527 forward primer
  source 1..21: mol_type = other DNA
ctgtgtctcagcccttagacg

SEQ ID NO: 86 - DNA, 25 bp, synthetic construct
  misc_feature 1..25: note = Synthetic: ZNF527 reverse primer
  source 1..25: mol_type = other DNA
ggattgagtggtaaccacatgtttt

SEQ ID NO: 87 - DNA, 21 bp, synthetic construct
  misc_feature 1..21: note = Synthetic: ZNF341 forward primer
  source 1..21: mol_type = other DNA
gtcttccctcaaggtgtacaa

SEQ ID NO: 88 - DNA, 20 bp, synthetic construct
  misc_feature 1..20: note = Synthetic: ZNF341 reverse primer
  source 1..20: mol_type = other DNA
tggctcttgatgtgctccag

SEQ ID NO: 89 - DNA, 19 bp, synthetic construct
  misc_feature 1..19: note = Synthetic: ZNF341 forward primer
  source 1..19: mol_type = other DNA
agacgttcccaaagctcga

SEQ ID NO: 90 - DNA, 19 bp, synthetic construct
  misc_feature 1..19: note = Synthetic: ZNF341 reverse primer
  source 1..19: mol_type = other DNA
tacagcgaggggaagtcct

SEQ ID NO: 91 - DNA, 23 bp, synthetic construct
  misc_feature 1..23: note = Synthetic: ZNF266 forward primer
  source 1..23: mol_type = other DNA
aggctttcccacaatccttacat

SEQ ID NO: 92 - DNA, 30 bp, synthetic construct
  misc_feature 1..30: note = Synthetic: ZNF266 reverse primer
  source 1..30: mol_type = other DNA
cctttgaatgtaagatatgtggaaaatcct

SEQ ID NO: 93 - DNA, 24 bp, synthetic construct
  misc_feature 1..24: note = Synthetic: ZNF266 forward primer
  source 1..24: mol_type = other DNA
atcactgaggcatgaggaatttct

SEQ ID NO: 94 - DNA, 28 bp, synthetic construct
  misc_feature 1..28: note = Synthetic: ZNF266 reverse primer
  source 1..28: mol_type = other DNA
cttcactagatcttctcaacttactgaa

SEQ ID NO: 95 - DNA, 26 bp, synthetic construct
  misc_feature 1..26: note = Synthetic: ZNF257 forward primer
  source 1..26: mol_type = other DNA
gaatatgagcaagatgcgtgttactt

SEQ ID NO: 96 - DNA, 26 bp, synthetic construct
  misc_feature 1..26: note = Synthetic: ZNF257 reverse primer
  source 1..26: mol_type = other DNA
atgtctcttcatattacagggctctt

SEQ ID NO: 97 - DNA, 21 bp, synthetic construct
  misc_feature 1..21: note = Synthetic: ZNF257 forward primer
  source 1..21: mol_type = other DNA
gatcacctgtctggagcaagg

SEQ ID NO: 98 - DNA, 22 bp, synthetic construct
  misc_feature 1..22: note = Synthetic: ZNF257 reverse primer
  source 1..22: mol_type = other DNA
gctttcactctcacctacctgg

SEQ ID NO: 99 - DNA, 30 bp, synthetic construct
  misc_feature 1..30: note = Synthetic: ZIM3 forward primer
  source 1..30: mol_type = other DNA
gtatttccacatagatcacactcataagct

SEQ ID NO: 100 - DNA, 29 bp, synthetic construct
  misc_feature 1..29: note = Synthetic: ZIM3 reverse primer
  source 1..29: mol_type = other DNA
cctataaatgtagcatatgtgagaaggcc

SEQ ID NO: 101 - DNA, 27 bp, synthetic construct
  misc_feature 1..27: note = Synthetic: ZIM3 forward primer
  source 1..27: mol_type = other DNA
agtgtgaattttctcatgatcgatgac

SEQ ID NO: 102 - DNA, 26 bp, synthetic construct
  misc_feature 1..26: note = Synthetic: ZIM3 reverse primer
  source 1..26: mol_type = other DNA
cagatcttgtgaaacaccagagaata

SEQ ID NO: 103 - DNA, 22 bp, synthetic construct
  misc_feature 1..22: note = Synthetic: ZIC4 forward primer
  source 1..22: mol_type = other DNA
cttgcagatgagctcctgtttg

SEQ ID NO: 104 - DNA, 17 bp, synthetic construct
  misc_feature 1..17: note = Synthetic: ZIC4 reverse primer
  source 1..17: mol_type = other DNA
tggctacgggggcatga

SEQ ID NO: 105 - DNA, 18 bp, synthetic construct
  misc_feature 1..18: note = Synthetic: ZIC4 forward primer
  source 1..18: mol_type = other DNA
agcgaggttcaccgtcag

SEQ ID NO: 106 - DNA, 20 bp, synthetic construct
  misc_feature 1..20: note = Synthetic: ZIC4 reverse primer
  source 1..20: mol_type = other DNA
tccctggagacatgtacgcg

SEQ ID NO: 107 - DNA, 18 bp, synthetic construct
  misc_feature 1..18: note = Synthetic: ZIC4 forward primer
  source 1..18: mol_type = other DNA
cacctgggacttgtggcc

SEQ ID NO: 108 - DNA, 17 bp, synthetic construct
  misc_feature 1..17: note = Synthetic: ZIC4 reverse primer
  source 1..17: mol_type = other DNA
agctcgctgcgtaagca

SEQ ID NO: 109 - DNA, 17 bp, synthetic construct
  misc_feature 1..17: note = Synthetic: ZIC4 forward primer
  source 1..17: mol_type = other DNA
cccgtgcaccttcatgt

SEQ ID NO: 110 - DNA, 19 bp, synthetic construct
  misc_feature 1..19: note = Synthetic: ZIC4 reverse primer
  source 1..19: mol_type = other DNA
gctgcgacaagtgctacac

SEQ ID NO: 111 - DNA, 21 bp, synthetic construct
  misc_feature 1..21: note = Synthetic: ZIC4 forward primer
  source 1..21: mol_type = other DNA
gtatggcttgtcgctagtgtg

SEQ ID NO: 112 - DNA, 20 bp, synthetic construct
  misc_feature 1..20: note = Synthetic: ZIC4 reverse primer
  source 1..20: mol_type = other DNA
ttcagatgcgagttcgaggg

SEQ ID NO: 113 - DNA, 17 bp, synthetic construct
  misc_feature 1..17: note = Synthetic: ZIC4 forward primer
  source 1..17: mol_type = other DNA
gctgctgttggcgaagc

SEQ ID NO: 114 - DNA, 23 bp, synthetic construct
  misc_feature 1..23: note = Synthetic: ZIC4 reverse primer
  source 1..23: mol_type = other DNA
acccacaagcactaatgtctctg

SEQ ID NO: 115 - DNA, 23 bp, synthetic construct
  misc_feature 1..23: note = Synthetic: ZFYVE21 forward primer
  source 1..23: mol_type = other DNA
gagacagccactatgaaatcgaa

SEQ ID NO: 116 - DNA, 22 bp, synthetic construct
  misc_feature 1..22: note = Synthetic: ZFYVE21 reverse primer
  source 1..22: mol_type = other DNA
atttacctccaggagggaagcc

SEQ ID NO: 117 - DNA, 23 bp, synthetic construct
  misc_feature 1..23: note = Synthetic: ZFPM2 forward primer
  source 1..23: mol_type = other DNA
tcattccagtgtttcctgcctag

SEQ ID NO: 118 - DNA, 20 bp, synthetic construct
  misc_feature 1..20: note = Synthetic: ZFPM2 reverse primer
  source 1..20: mol_type = other DNA
ttttgggagacgtggtcgtc

SEQ ID NO: 119 - DNA, 28 bp, synthetic construct
  misc_feature 1..28: note = Synthetic: ZFPM2 forward primer
  source 1..28: mol_type = other DNA
cagcaaaaagtgtttatctcagtctgag

SEQ ID NO: 120 - DNA, 22 bp, synthetic construct
  misc_feature 1..22: note = Synthetic: ZFPM2 reverse primer
  source 1..22: mol_type = other DNA
acagtgcactcgtgatagtcca

SEQ ID NO: 121 - DNA, 24 bp, synthetic construct
  misc_feature 1..24: note = Synthetic: ZFP36L2 forward primer
  source 1..24: mol_type = other DNA
cggaatttgttctccttgttgagc

SEQ ID NO: 122 - DNA, 17 bp, synthetic construct
  misc_feature 1..17: note = Synthetic: ZFP36L2 reverse primer
  source 1..17: mol_type = other DNA
gtccgacctcctacggc

SEQ ID NO: 123 - DNA, 18 bp, synthetic construct
  misc_feature 1..18: note = Synthetic: ZFP36L2 forward primer
  source 1..18: mol_type = other DNA
acggctccttaagggtgc

SEQ ID NO: 124 - DNA, 18 bp, synthetic construct
  misc_feature 1..18: note = Synthetic: ZFP36L2 reverse primer
  source 1..18: mol_type = other DNA
ctgctcgcccaagttccc

SEQ ID NO: 125 - DNA, 19 bp, synthetic construct
  misc_feature 1..19: note = Synthetic: ZFP36L2 forward primer
  source 1..19: mol_type = other DNA
gcgaactggcacttttcgc

SEQ ID NO: 126 - DNA, 19 bp, synthetic construct
  misc_feature 1..19: note = Synthetic: ZFP36L2 reverse primer
  source 1..19: mol_type = other DNA
ctacaagaccgagctgtgc

SEQ ID NO: 127 - DNA, 17 bp, synthetic construct
  misc_feature 1..17: note = Synthetic: ZFP36L2 forward primer
  source 1..17: mol_type = other DNA
acgtgccgctctcctcg

SEQ ID NO: 128 - DNA, 17 bp, synthetic construct
  misc_feature 1..17: note = Synthetic: ZFP36L2 reverse primer
  source 1..17: mol_type = other DNA
gcacctcctgcacctgc

SEQ ID NO: 129 - DNA, 21 bp, synthetic construct
  misc_feature 1..21: note = Synthetic: ZFP36L2 forward primer
  source 1..21: mol_type = other DNA
tgtagcgcgtggagttgatct

SEQ ID NO: 130 - DNA, 20 bp, synthetic construct
  misc_feature 1..20: note = Synthetic: ZFP36L2 reverse primer
  source 1..20: mol_type = other DNA
tttagcgagaacggcgatcg

SEQ ID NO: 131 - DNA, 21 bp, synthetic construct
  misc_feature 1..21: note = Synthetic: ZFHX4 forward primer
  source 1..21: mol_type = other DNA
ctggctttgccttcttaaaag

SEQ ID NO: 132 - DNA, 24 bp, synthetic construct
  misc_feature 1..24: note = Synthetic: ZFHX4 reverse primer
  source 1..24: mol_type = other DNA
cacttcagcctttggcatttgggt

SEQ ID NO: 133 - DNA, 17 bp, synthetic construct
  misc_feature 1..17: note = Synthetic: ZFHX4 forward primer
  source 1..17: mol_type = other DNA
gagcacctcgagctcag

SEQ ID NO: 134 - DNA, 29 bp, synthetic construct
  misc_feature 1..29: note = Synthetic: ZFHX4 reverse primer
  source 1..29: mol_type = other DNA
taattggggtgttcactactaaactagac

SEQ ID NO: 135 - DNA, 19 bp, synthetic construct
  misc_feature 1..19: note = Synthetic: ZFHX4 forward primer
  source 1..19: mol_type = other DNA
cctggcggtgtgaagtttg

SEQ ID NO: 136 - DNA, 21 bp, synthetic construct
  misc_feature 1..21: note = Synthetic: ZFHX4 reverse primer
  source 1..21: mol_type = other DNA
atgtgcttttcgctggtcata

SEQ ID NO: 137 - DNA, 19 bp, synthetic construct
  misc_feature 1..19: note = Synthetic: ZFHX4 forward primer
  source 1..19: mol_type = other DNA
caggaacctccgaattcat

SEQ ID NO: 138 - DNA, 21 bp, synthetic construct
  misc_feature 1..21: note = Synthetic: ZFHX4 reverse primer
  source 1..21: mol_type = other DNA
cccaagtgcagattatgctgg

SEQ ID NO: 139 - DNA, 25 bp, synthetic construct
  misc_feature 1..25: note = Synthetic: ZFHX4 forward primer
  source 1..25: mol_type = other DNA
cattctttcagcctcagtttctaaa

SEQ ID NO: 140 - DNA, 22 bp, synthetic construct
  misc_feature 1..22: note = Synthetic: ZFHX4 reverse primer
  source 1..22: mol_type = other DNA
aaagagaaactgaggctgctga

SEQ ID NO: 141 - DNA, 24 bp, synthetic construct
  misc_feature 1..24: note = Synthetic: ZFHX4 forward primer
  source 1..24: mol_type = other DNA
tttcctatgaccccagaagcactg

SEQ ID NO: 142 - DNA, 18 bp, synthetic construct
  misc_feature 1..18: note = Synthetic: ZFHX4 reverse primer
  source 1..18: mol_type = other DNA
ctggcaagcccaaatctg

SEQ ID NO: 143 - DNA, 24 bp, synthetic construct
  misc_feature 1..24: note = Synthetic: ZFHX4 forward primer
  source 1..24: mol_type = other DNA
ccctacatgatatttgaccccaac

SEQ ID NO: 144 - DNA, 17 bp, synthetic construct
  misc_feature 1..17: note = Synthetic: ZFHX4 reverse primer
  source 1..17: mol_type = other DNA
ccgttgtgggggctgtg

SEQ ID NO: 145 - DNA, 18 bp, synthetic construct
  misc_feature 1..18: note = Synthetic: ZFHX4 forward primer
  source 1..18: mol_type = other DNA
ggccagttcctcccacac

SEQ ID NO: 146 - DNA, 30 bp, synthetic construct
  misc_feature 1..30: note = Synthetic: ZFHX4 reverse primer
  source 1..30: mol_type = other DNA
tttatcgtctagtttcctttttagggaagc

SEQ ID NO: 147 - DNA, 25 bp, synthetic construct
  misc_feature 1..25: note = Synthetic: ZFHX4 forward primer
  source 1..25: mol_type = other DNA
gtgaaaaagaaggagggaatagcgg

SEQ ID NO: 148 - DNA, 18 bp, synthetic construct
  misc_feature 1..18: note = Synthetic: ZFHX4 reverse primer
  source 1..18: mol_type = other DNA
tgttccggggtgatcgtg

SEQ ID NO: 149 - DNA, 23 bp, synthetic construct
  misc_feature 1..23: note = Synthetic: ZFHX4 forward primer
  source 1..23: mol_type = other DNA
aacaccgagataaacgcttgaga

SEQ ID NO: 150 - DNA, 22 bp, synthetic construct
  misc_feature 1..22: note = Synthetic: ZFHX4 reverse primer
  source 1..22: mol_type = other DNA
ggaatccagcaagtatttttca

SEQ ID NO: 151 - DNA, 29 bp, synthetic construct
  misc_feature 1..29: note = Synthetic: ZFHX4 forward primer
  source 1..29: mol_type = other DNA
aatcctaccagaaaaatgcttgatcatat

SEQ ID NO: 152 - DNA, 18 bp, synthetic construct
  misc_feature 1..18: note = Synthetic: ZFHX4 reverse primer
  source 1..18: mol_type = other DNA
ccgcgctcgtgtattctg

SEQ ID NO: 153 - DNA, 19 bp, synthetic construct
  misc_feature 1..19: note = Synthetic: ZFHX4 forward primer
  source 1..19: mol_type = other DNA
gtcgtgcaagtctggttcc

SEQ ID NO: 154 - DNA, 25 bp, synthetic construct
  misc_feature 1..25: note = Synthetic: ZFHX4 reverse primer
  source 1..25: mol_type = other DNA
taaggccgactttgctttaaacagg

SEQ ID NO: 155 - DNA, 19 bp, synthetic construct
  misc_feature 1..19: note = Synthetic: ZFHX4 forward primer
  source 1..19: mol_type = other DNA
tgctgaggctgggtatgat

SEQ ID NO: 156 - DNA, 21 bp, synthetic construct
  misc_feature 1..21: note = Synthetic: ZFHX4 reverse primer
  source 1..21: mol_type = other DNA
gtcactgattgccgtattaat

SEQ ID NO: 157 - DNA, 26 bp, synthetic construct
  misc_feature 1..26: note = Synthetic: ZFHX4 forward primer
  source 1..26: mol_type = other DNA
cgattttgatgagacttcatcgatta

SEQ ID NO: 158 - DNA, 22 bp, synthetic construct
  misc_feature 1..22: note = Synthetic: ZFHX4 reverse primer
  source 1..22: mol_type = other DNA
tcctgtggtgctttccatttca

SEQ ID NO: 159 - DNA, 20 bp, synthetic construct
  misc_feature 1..20: note = Synthetic: ZFHX4 forward primer
  source 1..20: mol_type = other DNA
cgagctccccaaatccattc

SEQ ID NO: 160 - DNA, 22 bp, synthetic construct
  misc_feature 1..22: note = Synthetic: ZFHX4 reverse primer
  source 1..22: mol_type = other DNA
gctcatttgcgttcgaaaacgc

SEQ ID NO: 161 - DNA, 19 bp, synthetic construct
  misc_feature 1..19: note = Synthetic: ZFHX4 forward primer
  source 1..19: mol_type = other DNA
taatgatcggccgggtcac

SEQ ID NO: 162 - DNA, 24 bp, synthetic construct
  misc_feature 1..24: note = Synthetic: ZFHX4 reverse primer
  source 1..24: mol_type = other DNA
tagtcactaaagcaagccttgaga

SEQ ID NO: 163 - DNA, 24 bp, synthetic construct
  misc_feature 1..24: note = Synthetic: ZFHX4 forward primer
  source 1..24: mol_type = other DNA
tgatcatcggatgaccctcaatga

SEQ ID NO: 164 - DNA, 27 bp, synthetic construct
  misc_feature 1..27: note = Synthetic: ZFHX4 reverse primer
  source 1..27: mol_type = other DNA
gttccagaaagcttataagaggttctt

SEQ ID NO: 165 - DNA, 22 bp, synthetic construct
  misc_feature 1..22: note = Synthetic: ZFHX4 forward primer
  source 1..22: mol_type = other DNA
cgccataatacaggggattggc

SEQ ID NO: 166 - DNA, 26 bp, synthetic construct
  misc_feature 1..26: note = Synthetic: ZFHX4 reverse primer
  source 1..26: mol_type = other DNA
ggtcctatgaggtttgtagtagaaaa

SEQ ID NO: 167 - DNA, 23 bp, synthetic construct
  misc_feature 1..23: note = Synthetic: ZDHHC7 forward primer
  source 1..23: mol_type = other DNA
agggattcatccagaggagtgag

SEQ ID NO: 168 - DNA, 22 bp, synthetic construct
  misc_feature 1..22: note = Synthetic: ZDHHC7 reverse primer
  source 1..22: mol_type = other DNA
aaagtgagaagcccacatggga

SEQ ID NO: 169 - DNA, 20 bp, synthetic construct
  misc_feature 1..20: note = Synthetic: ZBTB20 forward primer
  source 1..20: mol_type = other DNA
gacggagcagacgtaagtgg

SEQ ID NO: 170 - DNA, 18 bp, synthetic construct
  misc_feature 1..18: note = Synthetic: ZBTB20 reverse primer
  source 1..18: mol_type = other DNA
gcacagtgccagcaatgg

SEQ ID NO: 171 - DNA, 21 bp, synthetic construct
  misc_feature 1..21: note = Synthetic: XYLT2 forward primer
  source 1..21: mol_type = other DNA
ccaggaggtgctggaaatcct

SEQ ID NO: 172 - DNA, 21 bp, synthetic construct
  misc_feature 1..21: note = Synthetic: XYLT2 reverse primer
  source 1..21: mol_type = other DNA
ttctcccagtaggccttgagg

SEQ ID NO: 173 - DNA, 25 bp, synthetic construct
  misc_feature 1..25: note = Synthetic: XRCC5 forward primer
  source 1..25: mol_type = other DNA
attcctggtatagaatccccatttg

SEQ ID NO: 174 - DNA, 24 bp, synthetic construct
  misc_feature 1..24: note = Synthetic: XRCC5 reverse primer
  source 1..24: mol_type = other DNA
gttacaagctcagtgtcaatctga

SEQ ID NO: 175 - DNA, 17 bp, synthetic construct
  misc_feature 1..17: note = Synthetic: XKR7 forward primer
  source 1..17: mol_type = other DNA
gggtccccaggcacctg

SEQ ID NO: 176 - DNA, 17 bp, synthetic construct
  misc_feature 1..17: note = Synthetic: XKR7 reverse primer
  source 1..17: mol_type = other DNA
ggtccctgcacgctctc

SEQ ID NO: 177 - DNA, 19 bp, synthetic construct
  misc_feature 1..19: note = Synthetic: XKR7 forward primer
  source 1..19: mol_type = other DNA
caggtgctgagcgggatgg

SEQ ID NO: 178 - DNA, 17 bp, synthetic construct
  misc_feature 1..17: note = Synthetic: XKR7 reverse primer
  source 1..17: mol_type = other DNA
gccgcacctggaagaca

SEQ ID NO: 179 - DNA, 28 bp, synthetic construct
  misc_feature 1..28: note = Synthetic: XIRP2 forward primer
  source 1..28: mol_type = other DNA
atgtcaagactgtgagatacatgtttga

SEQ ID NO: 180 - DNA, 24 bp, synthetic construct
  misc_feature 1..24: note = Synthetic: XIRP2 reverse primer
  source 1..24: mol_type = other DNA
ctgcagtaaatgaacctcatccac

SEQ ID NO: 181 - DNA, 25 bp, synthetic construct
  misc_feature 1..25: note = Synthetic: XIRP2 forward primer
  source 1..25: mol_type = other DNA
tcaacttggacagcttcattcagtg

SEQ ID NO: 182 - DNA, 29 bp, synthetic construct
  misc_feature 1..29: note = Synthetic: XIRP2 reverse primer
  source 1..29: mol_type = other DNA
gaaccatctctaataacatataatggttg

SEQ ID NO: 183 - DNA, 23 bp, synthetic construct
  misc_feature 1..23: note = Synthetic: XIRP2 forward primer
  source 1..23: mol_type = other DNA
atttgaaactcagccactggatc

SEQ ID NO: 184 - DNA, 26 bp, synthetic construct
  misc_feature 1..26: note = Synthetic: XIRP2 reverse primer
  source 1..26: mol_type = other DNA
acttgtctttacattgccaccttgta

SEQ ID NO: 185 - DNA, 30 bp, synthetic construct
  misc_feature 1..30: note = Synthetic: XIRP2 forward primer
  source 1..30: mol_type = other DNA
cataatattatgcccagtattgaccatata

SEQ ID NO: 186 - DNA, 30 bp, synthetic construct
  misc_feature 1..30: note = Synthetic: XIRP2 reverse primer
  source 1..30: mol_type = other DNA
ttttgtatttcattgacacttactgttcgt

SEQ ID NO: 187 - DNA, 23 bp, synthetic construct
  misc_feature 1..23: note = Synthetic: XIRP2 forward primer
  source 1..23: mol_type = other DNA
tcctccacctccagtagatgaga

SEQ ID NO: 188 - DNA, 22 bp, synthetic construct
  misc_feature 1..22: note = Synthetic: XIRP2 reverse primer
  source 1..22: mol_type = other DNA
gcttttgagatggagttggagg

SEQ ID NO: 189 - DNA, 17 bp, synthetic construct
  misc_feature 1..17: note = Synthetic: XIRP2 forward primer
  source 1..17: mol_type = other DNA
tctgccgcctcctcctc

SEQ ID NO: 190 - DNA, 19 bp, synthetic construct
  misc_feature 1..19: note = Synthetic: XIRP2 reverse primer
  source 1..19: mol_type = other DNA
cttttccggagcagaggag

SEQ ID NO: 191 - DNA, 20 bp, synthetic construct
  misc_feature 1..20: note = Synthetic: XIRP2 forward primer
  source 1..20: mol_type = other DNA
gttgccacctcccacattgc

SEQ ID NO: 192 - DNA, 24 bp, synthetic construct
  misc_feature 1..24: note = Synthetic: XIRP2 reverse primer
  source 1..24: mol_type = other DNA
actttgggggaaaaatcgttctta

SEQ ID NO: 193 - DNA, 28 bp, synthetic construct
  misc_feature 1..28: note = Synthetic: XIRP2 forward primer
  source 1..28: mol_type = other DNA
cccaaacttcccaagcatataaaagata

SEQ ID NO: 194 - DNA, 31 bp, synthetic construct
  misc_feature 1..31: note = Synthetic: XIRP2 reverse primer
  source 1..31: mol_type = other DNA
atcctttgaggtagtaattttacattccata

SEQ ID NO: 195 - DNA, 19 bp, synthetic construct
  misc_feature 1..19: note = Synthetic: WNT1 forward primer
  source 1..19: mol_type = other DNA
ctcctgctcagaaggttcc

SEQ ID NO: 196 - DNA, 17 bp, synthetic construct
  misc_feature 1..17: note = Synthetic: WNT1 reverse primer
  source 1..17: mol_type = other DNA
agaggcggccgaagtca

SEQ ID NO: 197 - DNA, 18 bp, synthetic construct
  misc_feature 1..18: note = Synthetic: WNT1 forward primer
  source 1..18: mol_type = other DNA
gctgcagcgacaacattg

SEQ ID NO: 198 - DNA, 21 bp, synthetic construct
  misc_feature 1..21: note = Synthetic: WNT1 reverse primer
  source 1..21: mol_type = other DNA
cctcgttgttgtgaaggttca

SEQ ID NO: 199 - DNA, 20 bp, synthetic construct
  misc_feature 1..20: note = Synthetic: WDR87 forward primer
  source 1..20: mol_type = other DNA
tctcctgggccagattcttc

SEQ ID NO: 200 - DNA, 25 bp, synthetic construct
  misc_feature 1..25: note = Synthetic: WDR87 reverse primer
  source 1..25: mol_type = other DNA
agaagatgaaactggcccaaaaaag

SEQ ID NO: 201 - DNA, 25 bp, synthetic construct
  misc_feature 1..25: note = Synthetic: WDR87 forward primer
  source 1..25: mol_type = other DNA
ccatgctgttgatccatctttccct

SEQ ID NO: 202 - DNA, 23 bp, synthetic construct
  misc_feature 1..23: note = Synthetic: WDR87 reverse primer
  source 1..23: mol_type = other DNA
cggaaaagggagcaattgattga

SEQ ID NO: 203 - DNA, 21 bp, synthetic construct
  misc_feature 1..21: note = Synthetic: WBSCR17 forward primer
  source 1..21: mol_type = other DNA
gtccccctagaggagtatgtc

SEQ ID NO: 204 - DNA, 19 bp, synthetic construct
  misc_feature 1..19: note = Synthetic: WBSCR17 reverse primer
  source 1..19: mol_type = other DNA
ccttccagccctcaatgcg

SEQ ID NO: 205 - DNA, 21 bp, synthetic construct
  misc_feature 1..21: note = Synthetic: WBSCR17 forward primer
  source 1..21: mol_type = other DNA
gaagagggaaggcctgatccg

SEQ ID NO: 206 - DNA, 20 bp, synthetic construct
  misc_feature 1..20: note = Synthetic: WBSCR17 reverse primer
  source 1..20: mol_type = other DNA
attccacgtgggcatcaaag

SEQ ID NO: 207 - DNA, 19 bp, synthetic construct
  misc_feature 1..19: note = Synthetic: WBSCR17 forward primer
  source 1..19: mol_type = other DNA
gctgagccggttctatccc

SEQ ID NO: 208 - DNA, 17 bp, synthetic construct
  misc_feature 1..17: note = Synthetic: WBSCR17 reverse primer
  source 1..17: mol_type = other DNA
cccgtgggccgagttct

SEQ ID NO: 209 - DNA, 21 bp, synthetic construct
  misc_feature 1..21: note = Synthetic: WBSCR17 forward primer
  source 1..21: mol_type = other DNA
actttgaggtgcagcggtacg

SEQ ID NO: 210 - DNA, 19 bp, synthetic construct
  misc_feature 1..19: note = Synthetic: WBSCR17 reverse primer
  source 1..19: mol_type = other DNA
gtcccaccagtcttttggg

SEQ ID NO: 211 - DNA, 17 bp, synthetic construct
  misc_feature 1..17: note = Synthetic: VSTM4 forward primer
  source 1..17: mol_type = other DNA
tgtggtcggggtgtgct

SEQ ID NO: 212 - DNA, 21 bp, synthetic construct
  misc_feature 1..21: note = Synthetic: VSTM4 reverse primer
  source 1..21: mol_type = other DNA
tcttcatgctggtcatcgtct

SEQ ID NO: 213 - DNA, 22 bp, synthetic construct
  misc_feature 1..22: note = Synthetic: VSTM4 forward primer
  source 1..22: mol_type = other DNA
cttgttaaacacagactgccag

SEQ ID NO: 214 - DNA, 26 bp, synthetic construct
  misc_feature 1..26: note = Synthetic: VSTM4 reverse primer
  source 1..26: mol_type = other DNA
cttgcctttcagatctctatgtgtat

SEQ ID NO: 215 - DNA, 21 bp, synthetic construct
  misc_feature 1..21: note = Synthetic: VNN2 forward primer
  source 1..21: mol_type = other DNA
taacgtgccacgagttttcct

SEQ ID NO: 216 - DNA, 24 bp, synthetic construct
  misc_feature 1..24: note = Synthetic: VNN2 reverse primer
  source 1..24: mol_type = other DNA
aaaagccatgtaattcccgtgact

SEQ ID NO: 217 - DNA, 17 bp, synthetic construct
  misc_feature 1..17: note = Synthetic: VHL forward primer
  source 1..17: mol_type = other DNA
ctgcgctcggtgaactc

SEQ ID NO: 218 - DNA, 17 bp, synthetic construct
  misc_feature 1..17: note = Synthetic: VHL reverse primer
  source 1..17: mol_type = other DNA
ctcgccgtcgaagttga

SEQ ID NO: 219 - DNA, 17 bp, synthetic construct
  misc_feature 1..17: note = Synthetic: VHL forward primer
  source 1..17: mol_type = other DNA
gtcgtgctgcccgtatg

SEQ ID NO: 220 - DNA, 17 bp, synthetic construct
  misc_feature 1..17: note = Synthetic: VHL reverse primer
  source 1..17: mol_type = other DNA
gctgggtcgggcctaag

SEQ ID NO: 221 - DNA, 19 bp, synthetic construct
  misc_feature 1..19: note = Synthetic: VHL forward primer
  source 1..19: mol_type = other DNA
ccggtgtggctctttaaca

SEQ ID NO: 222 - DNA, 28 bp, synthetic construct
  misc_feature 1..28: note = Synthetic: VHL reverse primer
  source 1..28: mol_type = other DNA
cacaaataattcagtttggttaaccaga

SEQ ID NO: 223 - DNA, 23 bp, synthetic construct
  misc_feature 1..23: note = Synthetic: VHL forward primer
  source 1..23: mol_type = other DNA
taggtcacctttggctcttcaga

SEQ ID NO: 224 - DNA, 24 bp, synthetic construct
  misc_feature 1..24: note = Synthetic: VHL reverse primer
  source 1..24: mol_type = other DNA
ataggctgtccgtcaacattgaga

SEQ ID NO: 225 - DNA, 18 bp, synthetic construct
  misc_feature 1..18: note = Synthetic: VHL forward primer
  source 1..18: mol_type = other DNA
agcgatgcctccaggttg

SEQ ID NO: 226 - DNA, 22 bp, synthetic construct
  misc_feature 1..22: note = Synthetic: VHL reverse primer
  source 1..22: mol_type = other DNA
gtggtcttccagatcttcgtag

SEQ ID NO: 227 - DNA, 24 bp, synthetic construct
  misc_feature 1..24: note = Synthetic: VHL forward primer
  source 1..24: mol_type = other DNA
cctagtcaagcctgagaattacag

SEQ ID NO: 228 - DNA, 21 bp, synthetic construct
  misc_feature 1..21: note = Synthetic: VHL reverse primer
  source 1..21: mol_type = other DNA
tccaggtctttctgcacattt

SEQ ID NO: 229 - DNA, 24 bp, synthetic construct
  misc_feature 1..24: note = Synthetic: VEGFC forward primer
  source 1..24: mol_type = other DNA
actggcatgtgttttcatcaaatt

SEQ ID NO: 230 - DNA, 17 bp, synthetic construct
  misc_feature 1..17: note = Synthetic: VEGFC reverse primer
  source 1..17: mol_type = other DNA
agagcggggcttcggcc

SEQ ID NO: 231 - DNA, 17 bp, synthetic construct
  misc_feature 1..17: note = Synthetic: VEGFC forward primer
  source 1..17: mol_type = other DNA
ggtccacagctggcagg

SEQ ID NO: 232 - DNA, 21 bp, synthetic construct
  misc_feature 1..21: note = Synthetic: VEGFC reverse primer
  source 1..21: mol_type = other DNA
gagctggatgaagagacctgt

SEQ ID NO: 233 - DNA, 23 bp, synthetic construct
  misc_feature 1..23: note = Synthetic: UVRAG forward primer
  source 1..23: mol_type = other DNA
tcttagattcatgcccgaaacca

SEQ ID NO: 234 - DNA, 34 bp, synthetic construct
  misc_feature 1..34: note = Synthetic: UVRAG reverse primer
  source 1..34: mol_type = other DNA
ataacattagaaggatcttcttaccttatgttca

SEQ ID NO: 235 - DNA, 24 bp, synthetic construct
  misc_feature 1..24: note = Synthetic: UVRAG forward primer
  source 1..24: mol_type = other DNA
gctgaatgatggatactatggtgc

SEQ ID NO: 236 - DNA, 21 bp, synthetic construct
  misc_feature 1..21: note = Synthetic: UVRAG reverse primer
  source 1..21: mol_type = other DNA
aggcacacctgcactaaacaa

SEQ ID NO: 237 - DNA, 22 bp, synthetic construct
  misc_feature 1..22: note = Synthetic: USP29 forward primer
  source 1..22: mol_type = other DNA
tgacccaagatgcaacaaagcc

SEQ ID NO: 238 - DNA, 28 bp, synthetic construct
  misc_feature 1..28: note = Synthetic: USP29 reverse primer
  source 1..28: mol_type = other DNA
ttgtaaaactgcattcatgtaacaggtg

SEQ ID NO: 239 - DNA, 20 bp, synthetic construct
  misc_feature 1..20: note = Synthetic: USP29 forward primer
  source 1..20: mol_type = other DNA
caggggttccccaatttggg

SEQ ID NO: 240 - DNA, 25 bp, synthetic construct
  misc_feature 1..25: note = Synthetic: USP29 reverse primer
  source 1..25: mol_type = other DNA
accttgagtgagtaagtcatcagca

SEQ ID NO: 241 - DNA, 20 bp, synthetic construct
  misc_feature 1..20: note = Synthetic: USH2A forward primer
  source 1..20: mol_type = other DNA
tgcgtccatggttgcaaacc

SEQ ID NO: 242 - DNA, 23 bp, synthetic construct
  misc_feature 1..23: note = Synthetic: USH2A reverse primer
  source 1..23: mol_type = other DNA
ctatgaagtgattcgcagatgct

SEQ ID NO: 243 - DNA, 23 bp, synthetic construct
  misc_feature 1..23: note = Synthetic: USH2A forward primer
  source 1..23: mol_type = other DNA
tgatttccccaagcttttccctc

SEQ ID NO: 244 - DNA, 23 bp, synthetic construct
  misc_feature 1..23: note = Synthetic: USH2A reverse primer
  source 1..23: mol_type = other DNA
gagcctgttaacccaaatggaaa

SEQ ID NO: 245 - DNA, 21 bp, synthetic construct
  misc_feature 1..21: note = Synthetic: USH2A forward primer
  source 1..21: mol_type = other DNA
tgaccactgcttgggtagaag

SEQ ID NO: 246 - DNA, 21 bp, synthetic construct
  misc_feature 1..21: note = Synthetic: USH2A reverse primer
  source 1..21: mol_type = other DNA
ctggacatggtgcagaaccgg

SEQ ID NO: 247 - DNA, 20 bp, synthetic construct
  misc_feature 1..20: note = Synthetic: USH2A forward primer
  source 1..20: mol_type = other DNA
ctctgagaccttctggtggg

SEQ ID NO: 248 - DNA, 22 bp, synthetic construct
  misc_feature 1..22: note = Synthetic: USH2A reverse primer
  source 1..22: mol_type = other DNA
cagtgaattctgcaggaaaagc

SEQ ID NO: 249 - DNA, 23 bp, synthetic construct
  misc_feature 1..23: note = Synthetic: USH2A forward primer
  source 1..23: mol_type = other DNA
cagatggtagctgaggtttcatg

SEQ ID NO: 250 - DNA, 19 bp, synthetic construct
  misc_feature 1..19: note = Synthetic: USH2A reverse primer
  source 1..19: mol_type = other DNA
tgtcctgtgcccctttggc

SEQ ID NO: 251 - DNA, 22 bp, synthetic construct
  misc_feature 1..22: note = Synthetic: USH2A forward primer
  source 1..22: mol_type = other DNA
taggaaacacatggctgaccac

SEQ ID NO: 252 - DNA, 24 bp, synthetic construct
  misc_feature 1..24: note = Synthetic: USH2A reverse primer
  source 1..24: mol_type = other DNA
cttacctggacaacactctcaaat

SEQ ID NO: 253 - DNA, 27 bp, synthetic construct
  misc_feature 1..27: note = Synthetic: USH2A forward primer
  source 1..27: mol_type = other DNA
aagccaattctgaaaggacattagtta

SEQ ID NO: 254 - DNA, 25 bp, synthetic construct
  misc_feature 1..25: note = Synthetic: USH2A reverse primer
  source 1..25: mol_type = other DNA
cagcagataatgttacaagaggaaa

SEQ ID NO: 255 - DNA, 26 bp, synthetic construct
  misc_feature 1..26: note = Synthetic: USH2A forward primer
  source 1..26: mol_type = other DNA
tattgatgtcataccccacaactttt

SEQ ID NO: 256 - DNA, 22 bp, synthetic construct
  misc_feature 1..22: note = Synthetic: USH2A reverse primer
  source 1..22: mol_type = other DNA
ccctccttcagtctttcccctc

SEQ ID NO: 257 - DNA, 25 bp, synthetic construct
  misc_feature 1..25: note = Synthetic: USH2A forward primer
  source 1..25: mol_type = other DNA
ttctcccaggagatattgagagagt

SEQ ID NO: 258 - DNA, 29 bp, synthetic construct
  misc_feature 1..29: note = Synthetic: USH2A reverse primer
  source 1..29: mol_type = other DNA
ttattgttctcattgatagcacctgtatt

SEQ ID NO: 259 - DNA, 34 bp, synthetic construct
  misc_feature 1..34: note = Synthetic: USH2A forward primer
  source 1..34: mol_type = other DNA
ttagaaaataaaaacaaattacctgggtctacat

SEQ ID NO: 260 - DNA, 22 bp, synthetic construct
  misc_feature 1..22: note = Synthetic: USH2A reverse primer
  source 1..22: mol_type = other DNA
tttcgccctaatggactcttaa

SEQ ID NO: 261 - DNA, 23 bp, synthetic construct
  misc_feature 1..23: note = Synthetic: USH2A forward primer
  source 1..23: mol_type = other DNA
agtgaaaaggactgagtgtgtta

SEQ ID NO: 262 - DNA, 21 bp, synthetic construct
  misc_feature 1..21: note = Synthetic: USH2A reverse primer
  source 1..21: mol_type = other DNA
cacagggatcccggaaagccc

SEQ ID NO: 263 - DNA, 25 bp, synthetic construct
  misc_feature 1..25: note = Synthetic: USH2A forward primer
  source 1..25: mol_type = other DNA
attgtgaaattctccaccaagccat

SEQ ID NO: 264 - DNA, 21 bp, synthetic construct
  misc_feature 1..21: note = Synthetic: USH2A reverse primer
  source 1..21: mol_type = other DNA
agggatcccaagtccagagct

SEQ ID NO: 265 - DNA, 26 bp, synthetic construct
  misc_feature 1..26: note = Synthetic: USH2A forward primer
  source 1..26: mol_type = other DNA
cagatgttggagtatcagagaacagc

SEQ ID NO: 266 - DNA, 22 bp, synthetic construct
  misc_feature 1..22: note = Synthetic: USH2A reverse primer
  source 1..22: mol_type = other DNA
ccagagtcccagactgtatgga

SEQ ID NO: 267 - DNA, 22 bp, synthetic construct
  misc_feature 1..22: note = Synthetic: USH2A forward primer
  source 1..22: mol_type = other DNA
gaataaacgacccaggcacatt

SEQ ID NO: 268 - DNA, 24 bp, synthetic construct
  misc_feature 1..24: note = Synthetic: USH2A reverse primer
  source 1..24: mol_type = other DNA
catctccttcaaacccaaatggtg

SEQ ID NO: 269 - DNA, 34 bp, synthetic construct
  misc_feature 1..34: note = Synthetic: USH2A forward primer
  source 1..34: mol_type = other DNA
gcttattatttacatagatagaatactcagtgac

SEQ ID NO: 270 - DNA, 23 bp, synthetic construct
  misc_feature 1..23: note = Synthetic: USH2A reverse primer
  source 1..23: mol_type = other DNA
tacagctgtacgtgtcatctgga

SEQ ID NO: 271 - DNA, 24 bp, synthetic construct
  misc_feature 1..24: note = Synthetic: UPF3A forward primer
  source 1..24: mol_type = other DNA
agttagaaaagaaacgtttgcggg

SEQ ID NO: 272 - DNA, 31 bp, synthetic construct
  misc_feature 1..31: note = Synthetic: UPF3A reverse primer
  source 1..31: mol_type = other DNA
tcctcagaattaccttaatccttacttcttt

SEQ ID NO: 273 - DNA, 29 bp, synthetic construct
  misc_feature 1..29: note = Synthetic: UNC13C forward primer
  source 1..29: mol_type = other DNA
atgaaactggtttgactatccttagaata

SEQ ID NO: 274 - DNA, 27 bp, synthetic construct
  misc_feature 1..27: note = Synthetic: UNC13C reverse primer
  source 1..27: mol_type = other DNA
ctcttcagtagatcttgtttcagattt

SEQ ID NO: 275 - DNA, 26 bp, synthetic construct
  misc_feature 1..26: note = Synthetic: UNC13C forward primer
  source 1..26: mol_type = other DNA
agtgatgatgtggctaaagaatttgt

SEQ ID NO: 276 - DNA, 24 bp, synthetic construct
  misc_feature 1..24: note = Synthetic: UNC13C reverse primer
  source 1..24: mol_type = other DNA
cttgcagtgtttgtttcaagcact

SEQ ID NO: 277 - DNA, 24 bp, synthetic construct
  misc_feature 1..24: note = Synthetic: UNC13C forward primer
  source 1..24: mol_type = other DNA
ccaaacacatgatgtcatggaaat

SEQ ID NO: 278 - DNA, 21 bp, synthetic construct
  misc_feature 1..21: note = Synthetic: UNC13C reverse primer
  source 1..21: mol_type = other DNA
attgacgtgccctcgtagttc

SEQ ID NO: 279 - DNA, 27 bp, synthetic construct
  misc_feature 1..27: note = Synthetic: UNC13C forward primer
  source 1..27: mol_type = other DNA
acttcagggaataagtcagattgaaac

SEQ ID NO: 280 - DNA, 20 bp, synthetic construct
  misc_feature 1..20: note = Synthetic: UNC13C reverse primer
  source 1..20: mol_type = other DNA
ccacactgctggagatctca

SEQ ID NO: 281 - DNA, 21 bp, synthetic construct
  misc_feature 1..21: note = Synthetic: UMODL1 forward primer
  source 1..21: mol_type = other DNA
cgtctacctgcactgcaaact

SEQ ID NO: 282 - DNA, 22 bp, synthetic construct
  misc_feature 1..22: note = Synthetic: UMODL1 reverse primer
  source 1..22: mol_type = other DNA
gaacgtgaatccaaccaaacgt

SEQ ID NO: 283 - DNA, 21 bp, synthetic construct
  misc_feature 1..21: note = Synthetic: UGT3A2 forward primer
  source 1..21: mol_type = other DNA
acaaaaacgtcgagcaggtac

SEQ ID NO: 284 - DNA, 19 bp, synthetic construct
  misc_feature 1..19: note = Synthetic: UGT3A2 reverse primer
  source 1..19: mol_type = other DNA
tggattgaccacgtcctcc

SEQ ID NO: 285 - DNA, 17 bp, synthetic construct
  misc_feature 1..17: note = Synthetic: UGT3A2 forward primer
  source 1..17: mol_type = other DNA
cgtcgcgccccctgtct

SEQ ID NO: 286 - DNA, 17 bp, synthetic construct
  misc_feature 1..17: note = Synthetic: UGT3A2 reverse primer
  source 1..17: mol_type = other DNA
ccgctcagccccacaca

SEQ ID NO: 287 - DNA, 19 bp, synthetic construct
  misc_feature 1..19: note = Synthetic: UBQLN2 forward primer
  source 1..19: mol_type = other DNA
cccccataggccccattgg

SEQ ID NO: 288 - DNA, 18 bp, synthetic construct
  misc_feature 1..18: note = Synthetic: UBQLN2 reverse primer
  source 1..18: mol_type = other DNA
taggtgcagcgctggaca

SEQ ID NO: 289 - DNA, 23 bp, synthetic construct
  misc_feature 1..23: note = Synthetic: U2AF1 forward primer
  source 1..23: mol_type = other DNA
aacaaacctggctaaacgtcggt

SEQ ID NO: 290 - DNA, 24 bp, synthetic construct
  misc_feature 1..24: note = Synthetic: U2AF1 reverse primer
  source 1..24: mol_type = other DNA
aattggagcatgtcgtcatggaga

SEQ ID NO: 291 - DNA, 20 bp, synthetic construct
  misc_feature 1..20: note = Synthetic: TYR forward primer
  source 1..20: mol_type = other DNA
tggcgggatgcagaaaagtg

SEQ ID NO: 292 - DNA, 23 bp, synthetic construct
  misc_feature 1..23: note = Synthetic: TYR reverse primer
  source 1..23: mol_type = other DNA
tgccaagaggagaagaatgatgc

SEQ ID NO: 293 - DNA, 22 bp, synthetic construct
  misc_feature 1..22: note = Synthetic: TYR forward primer
  source 1..22: mol_type = other DNA
agcaccccacaaatcctaactt

SEQ ID NO: 294 - DNA, 26 bp, synthetic construct
  misc_feature 1..26: note = Synthetic: TYR reverse primer
  source 1..26: mol_type = other DNA
cctccctactctgacatcgtatatct

SEQ ID NO: 295 - DNA, 24 bp, synthetic construct
  misc_feature 1..24: note = Synthetic: TTN forward primer
  source 1..24: mol_type = other DNA
tgtacttatcactggctggaagtt

SEQ ID NO: 296 - DNA, 20 bp, synthetic construct
  misc_feature 1..20: note = Synthetic: TTN reverse primer
  source 1..20: mol_type = other DNA
caggtgactcttcacgactt

SEQ ID NO: 297 - DNA, 24 bp, synthetic construct
  misc_feature 1..24: note = Synthetic: TTN forward primer
  source 1..24: mol_type = other DNA
ttctggggatccagctatcttgca

SEQ ID NO: 298 - DNA, 25 bp, synthetic construct
  misc_feature 1..25: note = Synthetic: TTN reverse primer
  source 1..25: mol_type = other DNA
tgactctttagaaccaccaaagttt

SEQ ID NO: 299 - DNA, 30 bp, synthetic construct
  misc_feature 1..30: note = Synthetic: TTN forward primer
  source 1..30: mol_type = other DNA
cttacctcatatccatgttctgtcttagga

SEQ ID NO: 300 - DNA, 29 bp, synthetic construct
  misc_feature 1..29: note = Synthetic: TTN reverse primer
  source 1..29: mol_type = other DNA
atgcagatcaagaaaactacagatctaac

SEQ ID NO: 301 - DNA, 24 bp, synthetic construct
  misc_feature 1..24: note = Synthetic: TTN forward primer
  source 1..24: mol_type = other DNA
cgtttatccacatggactaatctt

SEQ ID NO: 302 - DNA, 26 bp, synthetic construct
  misc_feature 1..26: note = Synthetic: TTN reverse primer
  source 1..26: mol_type = other DNA
tcatctggtgatcaatggtatcactg

SEQ ID NO: 303 - DNA, 26 bp, synthetic construct
  misc_feature 1..26: note = Synthetic: TTN forward primer
  source 1..26: mol_type = other DNA
tctcctaaggacagacctaaaatctt

SEQ ID NO: 304 - DNA, 22 bp, synthetic construct
  misc_feature 1..22: note = Synthetic: TTN reverse primer
  source 1..22: mol_type = other DNA
cacaggtgaagtgaaggtcacc

SEQ ID NO: 305 - DNA, 25 bp, synthetic construct
  misc_feature 1..25: note = Synthetic: TTN forward primer
  source 1..25: mol_type = other DNA
atcacaccttcaggattttccgcgg

SEQ ID NO: 306 - DNA, 22 bp, synthetic construct
  misc_feature 1..22: note = Synthetic: TTN reverse primer
  source 1..22: mol_type = other DNA
acctggacatcgtggactgcaa

SEQ ID NO: 307 - DNA, 20 bp, synthetic construct
  misc_feature 1..20: note = Synthetic: TTN forward primer
  source 1..20: mol_type = other DNA
tcaaaggttgcggtactacc

SEQ ID NO: 308 - DNA, 25 bp, synthetic construct
  misc_feature 1..25: note = Synthetic: TTN reverse primer
  source 1..25: mol_type = other DNA
agaaagatgacaactcaagcaccga

SEQ ID NO: 309 - DNA, 21 bp, synthetic construct
  misc_feature 1..21: note = Synthetic: TTN forward primer
  source 1..21: mol_type = other DNA
ttgtaacggctgcgtaaacgt

SEQ ID NO: 310 - DNA, 23 bp, synthetic construct
  misc_feature 1..23: note = Synthetic: TTN reverse primer
  source 1..23: mol_type = other DNA
tagctgggacaccctaatttatt

SEQ ID NO: 311 - DNA, 23 bp, synthetic construct
  misc_feature 1..23: note = Synthetic: TTN forward primer
  source 1..23: mol_type = other DNA
gttctggtcgacctttgatagtg

SEQ ID NO: 312 - DNA, 25 bp, synthetic construct
  misc_feature 1..25: note = Synthetic: TTN reverse primer
  source 1..25: mol_type = other DNA
gaggatagagccaccagaaatagaa

SEQ ID NO: 313 - DNA, 23 bp, synthetic construct
  misc_feature 1..23: note = Synthetic: TTN forward primer
  source 1..23: mol_type = other DNA
cacctttctgagatcagcatcga

SEQ ID NO: 314 - DNA, 22 bp, synthetic construct
  misc_feature 1..22: note = Synthetic: TTN reverse primer
  source 1..22: mol_type = other DNA
gtgtaggtgaacctgcaactct

SEQ ID NO: 315 - DNA, 27 bp, synthetic construct
  misc_feature 1..27: note = Synthetic: TTN forward primer
  source 1..27: mol_type = other DNA
caaactgtagagttgcaacattttcca

SEQ ID NO: 316 - DNA, 17 bp, synthetic construct
  misc_feature 1..17: note = Synthetic: TTN reverse primer
  source 1..17: mol_type = other DNA
ccggagagcctgctgaa

SEQ ID NO: 317 - DNA, 20 bp, synthetic construct
  misc_feature 1..20: note = Synthetic: TTN forward primer
  source 1..20: mol_type = other DNA
cgccttctatggatgcttgt

SEQ ID NO: 318 - DNA, 25 bp, synthetic construct
  misc_feature 1..25: note = Synthetic: TTN reverse primer
  source 1..25: mol_type = other DNA
accaccaagatttgtctccaaactg

SEQ ID NO: 319 - DNA, 21 bp, synthetic construct
  misc_feature 1..21: note = Synthetic: TTN forward primer
  source 1..21: mol_type = other DNA
agttccctgctgcctttaaac

SEQ ID NO: 320 - DNA, 24 bp, synthetic construct
  misc_feature 1..24: note = Synthetic: TTN reverse primer
  source 1..24: mol_type = other DNA
tgattctgtggaagttttgcctgg

SEQ ID NO: 321 - DNA, 22 bp, synthetic construct
  misc_feature 1..22: note = Synthetic: TTN forward primer
  source 1..22: mol_type = other DNA
tggtgaatgtgaggctcattcc

SEQ ID NO: 322 - DNA, 23 bp, synthetic construct
  misc_feature 1..23: note = Synthetic: TTN reverse primer
  source 1..23: mol_type = other DNA
tccgccttgcaatatctagaacc

SEQ ID NO: 323 - DNA, 27 bp, synthetic construct
  misc_feature 1..27: note = Synthetic: TTN forward primer
  source 1..27: mol_type = other DNA
aatagccttacaggtgtttggagtagg

SEQ ID NO: 324 - DNA, 21 bp, synthetic construct
  misc_feature 1..21: note = Synthetic: TTN reverse primer
  source 1..21: mol_type = other DNA
tgagacagcacgctttgaaac

SEQ ID NO: 325 - DNA, 26 bp, synthetic construct
  misc_feature 1..26: note = Synthetic: TTN forward primer
  source 1..26: mol_type = other DNA
ggatatcatcttcagagatttcggtt

SEQ ID NO: 326 - DNA, 27 bp, synthetic construct
  misc_feature 1..27: note = Synthetic: TTN reverse primer
  source 1..27: mol_type = other DNA
ttcacttttctagatcgggaaattaaa

SEQ ID NO: 327 - DNA, 29 bp, synthetic construct
  misc_feature 1..29: note = Synthetic: TTK forward primer
  source 1..29: mol_type = other DNA
agaagaagcagataaccaaactcttgata

SEQ ID NO: 328 - DNA, 34 bp, synthetic construct
  misc_feature 1..34: note = Synthetic: TTK reverse primer
  source 1..34: mol_type = other DNA
tactaatcataaagtcggatgatcttatcactgt

SEQ ID NO: 329 - DNA, 34 bp, synthetic construct
  misc_feature 1..34: note = Synthetic: TTK forward primer
  source 1..34: mol_type = other DNA
aacgaaatagcttatttgaataaactacaacaac

SEQ ID NO: 330 - DNA, 31 bp, synthetic construct
  misc_feature 1..31: note = Synthetic: TTK reverse primer
  source 1..31: mol_type = other DNA
tgaagaattatggcaaaaagttttcttttta

SEQ ID NO: 331 - DNA, 20 bp, synthetic construct
  misc_feature 1..20: note = Synthetic: TTC6 forward primer
  source 1..20: mol_type = other DNA
tttgagtgccaacttaaata

SEQ ID NO: 332 - DNA, 29 bp, synthetic construct
  misc_feature 1..29: note = Synthetic: TTC6 reverse primer
  source 1..29: mol_type = other DNA
atagcttcctcaatcagacctattttacc

SEQ ID NO: 333 - DNA, 19 bp, synthetic construct
  misc_feature 1..19: note = Synthetic: TSPAN10 forward primer
  source 1..19: mol_type = other DNA
gctgtcaaggggtctctgg

SEQ ID NO: 334 - DNA, 17 bp, synthetic construct
  misc_feature 1..17: note = Synthetic: TSPAN10 reverse primer
  source 1..17: mol_type = other DNA
gccagccccagcatggg

SEQ ID NO: 335 - DNA, 20 bp, synthetic construct
  misc_feature 1..20: note = Synthetic: TSHZ3 forward primer
  source 1..20: mol_type = other DNA
tgccttccacagtttccctc

SEQ ID NO: 336 - DNA, 20 bp, synthetic construct
  misc_feature 1..20: note = Synthetic: TSHZ3 reverse primer
  source 1..20: mol_type = other DNA
cacgggaaatctccggaaga

SEQ ID NO: 337 - DNA, 28 bp, synthetic construct
  misc_feature 1..28: note = Synthetic: TSHZ3 forward primer
  source 1..28: mol_type = other DNA
ttctctaactcagagacatacagaaggt

SEQ ID NO: 338 - DNA, 23 bp, synthetic construct
  misc_feature 1..23: note = Synthetic: TSHZ3 reverse primer
  source 1..23: mol_type = other DNA
agcaagcacgctgttaaacttca

SEQ ID NO: 339 - DNA, 19 bp, synthetic construct
  misc_feature 1..19: note = Synthetic: TSHZ2 forward primer
  source 1..19: mol_type = other DNA
aaggagccagtcccaacca

SEQ ID NO: 340 - DNA, 20 bp, synthetic construct
  misc_feature 1..20: note = Synthetic: TSHZ2 reverse primer
  source 1..20: mol_type = other DNA
acacggccgattgacatcaa

SEQ ID NO: 341 - DNA, 20 bp, synthetic construct
  misc_feature 1..20: note = Synthetic: TSHZ2 forward primer
  source 1..20: mol_type = other DNA
aaaatggtcaccccggctaa

SEQ ID NO: 342 - DNA, 24 bp, synthetic construct
  misc_feature 1..24: note = Synthetic: TSHZ2 reverse primer
  source 1..24: mol_type = other DNA
caaaagatcctgtggttgaatcgg

SEQ ID NO: 343 - DNA, 21 bp, synthetic construct
  misc_feature 1..21: note = Synthetic: TSHZ1 forward primer
  source 1..21: mol_type = other DNA
cttcagcctgaaggatctctc

SEQ ID NO: 344 - DNA, 17 bp, synthetic construct
  misc_feature 1..17: note = Synthetic: TSHZ1 reverse primer
  source 1..17: mol_type = other DNA
ggtggcccccagtgggc

SEQ ID NO: 345 - DNA, 23 bp, synthetic construct
  misc_feature 1..23: note = Synthetic: TSHZ1 forward primer
  source 1..23: mol_type = other DNA
cctcaccaacaaaactctgggcc

SEQ ID NO: 346 - DNA, 22 bp, synthetic construct
  misc_feature 1..22: note = Synthetic: TSHZ1 reverse primer
  source 1..22: mol_type = other DNA
ggttgcagagcttacattggaa

SEQ ID NO: 347 - DNA, 17 bp, synthetic construct
  misc_feature 1..17: note = Synthetic: TRPC4 forward primer
  source 1..17: mol_type = other DNA
tgagtgacggaggctgt

SEQ ID NO: 348 - DNA, 34 bp, synthetic construct
  misc_feature 1..34: note = Synthetic: TRPC4 reverse primer
  source 1..34: mol_type = other DNA
cagcccatacaaataattatgagataataaaact

SEQ ID NO: 349 - DNA, 21 bp, synthetic construct
  misc_feature 1..21: note = Synthetic: TRPC4 forward primer
  source 1..21: mol_type = other DNA
cgaggcactgagactcctttc

SEQ ID NO: 350 - DNA, 27 bp, synthetic construct
  misc_feature 1..27: note = Synthetic: TRPC4 reverse primer
  source 1..27: mol_type = other DNA
ctctgaattcactccagacattacacc

SEQ ID NO: 351 - DNA, 21 bp, synthetic construct
  misc_feature 1..21: note = Synthetic: TRIM58 forward primer
  source 1..21: mol_type = other DNA
gtgacgttaggtacagattga

SEQ ID NO: 352 - DNA, 20 bp, synthetic construct
  misc_feature 1..20: note = Synthetic: TRIM58 reverse primer
  source 1..20: mol_type = other DNA
caaggcgtcctccaactctt

SEQ ID NO: 353 - DNA, 24 bp, synthetic construct
  misc_feature 1..24: note = Synthetic: TRIM58 forward primer
  source 1..24: mol_type = other DNA
gatggctctggaacttatgaggaa

SEQ ID NO: 354 - DNA, 20 bp, synthetic construct
  misc_feature 1..20: note = Synthetic: TRIM58 reverse primer
  source 1..20: mol_type = other DNA
ccccaacatggtcttacctt

SEQ ID NO: 355 - DNA, 22 bp, synthetic construct
  misc_feature 1..22: note = Synthetic: TRIM58 forward primer
  source 1..22: mol_type = other DNA
ttcacctggtccaccacattct

SEQ ID NO: 356 - DNA, 17 bp, synthetic construct
  misc_feature 1..17: note = Synthetic: TRIM58 reverse primer
  source 1..17: mol_type = other DNA
gcacactgcgcaggtcg

SEQ ID NO: 357 - DNA, 17 bp, synthetic construct
  misc_feature 1..17: note = Synthetic: TRIM58 forward primer
  source 1..17: mol_type = other DNA
cgcacccgagtctgctc

SEQ ID NO: 358 - DNA, 22 bp, synthetic construct
  misc_feature 1..22: note = Synthetic: TRIM58 reverse primer
  source 1..22: mol_type = other DNA
gtcaaatcgctcagggttgttg

SEQ ID NO: 359 - DNA, 34 bp, synthetic construct
  misc_feature 1..34: note = Synthetic: TRHDE forward primer
  source 1..34: mol_type = other DNA
gaccttatctttatttattctataccccatttag

SEQ ID NO: 360 - DNA, 34 bp, synthetic construct
  misc_feature 1..34: note = Synthetic: TRHDE reverse primer
  source 1..34: mol_type = other DNA
atgcttgaacaagagatccattaaaattattttt

SEQ ID NO: 361 - DNA, 30 bp, synthetic construct
  misc_feature 1..30: note = Synthetic: TRDN forward primer
  source 1..30: mol_type = other DNA
ccaaattttatggaacttacctgaaaagtt

SEQ ID NO: 362 - DNA, 19 bp, synthetic construct
  misc_feature 1..19: note = Synthetic: TRDN reverse primer
  source 1..19: mol_type = other DNA
gcctggcttctggtcattg

SEQ ID NO: 363 - DNA, 23 bp, synthetic construct
  misc_feature 1..23: note = Synthetic: TRDN forward primer
  source 1..23: mol_type = other DNA
gctgaccacgtgattatcagggc

SEQ ID NO: 364 - DNA, 22 bp, synthetic construct
  misc_feature 1..22: note = Synthetic: TRDN reverse primer
  source 1..22: mol_type = other DNA
gaagaggacagtcacagaagac

SEQ ID NO: 365 - DNA, 33 bp, synthetic construct
  misc_feature 1..33: note = Synthetic: TRAT1 forward primer
  source 1..33: mol_type = other DNA
ccaaatgttgtttggatcatgtatttttaatca

SEQ ID NO: 366 - DNA, 22 bp, synthetic construct
  misc_feature 1..22: note = Synthetic: TRAT1 reverse primer
  source 1..22: mol_type = other DNA
agatttctctggtcgggctttc

SEQ ID NO: 367 - DNA, 29 bp, synthetic construct
  misc_feature 1..29: note = Synthetic: TRAT1 forward primer
  source 1..29: mol_type = other DNA
aaccaatggatgaaaattgctatgaacaa

SEQ ID NO: 368 - DNA, 23 bp, synthetic construct
  misc_feature 1..23: note = Synthetic: TRAT1 reverse primer
  source 1..23: mol_type = other DNA
gtggcttcctgcatcttatttac

SEQ ID NO: 369 - DNA, 32 bp, synthetic construct
  misc_feature 1..32: note = Synthetic: TRAPPC3L forward primer
  source 1..32: mol_type = other DNA
actcaagaaaacattttctctgaagtagaaaa

SEQ ID NO: 370 - DNA, 32 bp, synthetic construct
  misc_feature 1..32: note = Synthetic: TRAPPC3L reverse primer
  source 1..32: mol_type = other DNA
tcatattcttcatctatcaagcactatgtctc

SEQ ID NO: 371 - DNA, 20 bp, synthetic construct
  misc_feature 1..20: note = Synthetic: TRAPPC3L forward primer
  source 1..20: mol_type = other DNA
tggtcttcggtgtgcagggc

SEQ ID NO: 372 - DNA, 27 bp, synthetic construct
  misc_feature 1..27: note = Synthetic: TRAPPC3L reverse primer
  source 1..27: mol_type = other DNA
ggactgatacacctctaagaaacaggc

SEQ ID NO: 373 - DNA, 19 bp, synthetic construct
  misc_feature 1..19: note = Synthetic: TP53 forward primer
  source 1..19: mol_type = other DNA
ggggctgaggtcactcacc

SEQ ID NO: 374 - DNA, 20 bp, synthetic construct
  misc_feature 1..20: note = Synthetic: TP53 reverse primer
  source 1..20: mol_type = other DNA
gagcgcttcgagatgttccg

SEQ ID NO: 375 - DNA, 22 bp, synthetic construct
  misc_feature 1..22: note = Synthetic: TP53 forward primer
  source 1..22: mol_type = other DNA
agttccaaggcctcattcagct

SEQ ID NO: 376 - DNA, 22 bp, synthetic construct
  misc_feature 1..22: note = Synthetic: TP53 reverse primer
  source 1..22: mol_type = other DNA
acttctccccctcctctgttgc

SEQ ID NO: 377 - DNA, 17 bp, synthetic construct
  misc_feature 1..17: note = Synthetic: TP53 forward primer
  source 1..17: mol_type = other DNA
accagccctgtcgtctc

SEQ ID NO: 378 - DNA, 17 bp, synthetic construct
  misc_feature 1..17: note = Synthetic: TP53 reverse primer
  source 1..17: mol_type = other DNA
cgccatggccatctaca

SEQ ID NO: 379 - DNA, 19 bp, synthetic construct
  misc_feature 1..19: note = Synthetic: TP53 forward primer
  source 1..19: mol_type = other DNA
tcacaacctccgtcatgtg

SEQ ID NO: 380 - DNA, 18 bp, synthetic construct
  misc_feature 1..18: note = Synthetic: TP53 reverse primer
  source 1..18: mol_type = other DNA
aactggccaagacctgcc

SEQ ID NO: 381 - DNA, 20 bp, synthetic construct
  misc_feature 1..20: note = Synthetic: TP53 forward primer
  source 1..20: mol_type = other DNA
gtgtggaatcaacccacagc

SEQ ID NO: 382 - DNA, 25 bp, synthetic construct
  misc_feature 1..25: note = Synthetic: TP53 reverse primer
  source 1..25: mol_type = other DNA
tctccttcctcttcctacagtactc

SEQ ID NO: 383 - DNA, 24 bp, synthetic construct
  misc_feature 1..24: note = Synthetic: TP53 forward primer
  source 1..24: mol_type = other DNA
agttggcaaaacatcttgttgagg

SEQ ID NO: 384 - DNA, 23 bp, synthetic construct
  misc_feature 1..23: note = Synthetic: TP53 reverse primer
  source 1..23: mol_type = other DNA
ttgtgccctgactttcaactctg

SEQ ID NO: 385 - DNA, 18 bp, synthetic construct
  misc_feature 1..18: note = Synthetic: TP53 forward primer
  source 1..18: mol_type = other DNA
agggccactgacaaccac

SEQ ID NO: 386 - DNA, 23 bp, synthetic construct
  misc_feature 1..23: note = Synthetic: TP53 reverse primer
  source 1..23: mol_type = other DNA
ttttcgacatagtgtggtggtgc

SEQ ID NO: 387 - DNA, 17 bp, synthetic construct
  misc_feature 1..17: note = Synthetic: TP53 forward primer
  source 1..17: mol_type = other DNA
acctcaggcggctcata

SEQ ID NO: 388 - DNA, 17 bp, synthetic construct
  misc_feature 1..17: note = Synthetic: TP53 reverse primer
  source 1..17: mol_type = other DNA
ctggcccctcctcagca

SEQ ID NO: 389 - DNA, 25 bp, synthetic construct
  misc_feature 1..25: note = Synthetic: TP53 forward primer
  source 1..25: mol_type = other DNA
catccaaatactccacacgcaaatt

SEQ ID NO: 390 - DNA, 23 bp, synthetic construct
  misc_feature 1..23: note = Synthetic: TP53 reverse primer
  source 1..23: mol_type = other DNA
gcctctgattcctcactgattgc

SEQ ID NO: 391 - DNA, 18 bp, synthetic construct
  misc_feature 1..18: note = Synthetic: TP53 forward primer
  source 1..18: mol_type = other DNA
agaggcaagcagaggctg

SEQ ID NO: 392 - DNA, 17 bp, synthetic construct
  misc_feature 1..17: note = Synthetic: TP53 reverse primer
  source 1..17: mol_type = other DNA
tgggcggcatgaaccgg

SEQ ID NO: 393 - DNA, 23 bp, synthetic construct
  misc_feature 1..23: note = Synthetic: TP53 forward primer
  source 1..23: mol_type = other DNA
cttccagtgtgatgatggtgagg

SEQ ID NO: 394 - DNA, 21 bp, synthetic construct
  misc_feature 1..21: note = Synthetic: TP53 reverse primer
  source 1..21: mol_type = other DNA
gcctgtgttatctcctaggtt

SEQ ID NO: 395 - DNA, 25 bp, synthetic construct
  misc_feature 1..25: note = Synthetic: TP53 forward primer
  source 1..25: mol_type = other DNA
gttgtagtggatggtggtacagtca

SEQ ID NO: 396 - DNA, 20 bp, synthetic construct
  misc_feature 1..20: note = Synthetic: TP53 reverse primer
  source 1..20: mol_type = other DNA
aaaggcctcccctgcttgcc

SEQ ID NO: 397 - DNA, 19 bp, synthetic construct
  misc_feature 1..19: note = Synthetic: TP53 forward primer
  source 1..19: mol_type = other DNA
tctcctccaccgcttcttg

SEQ ID NO: 398 - DNA, 18 bp, synthetic construct
  misc_feature 1..18: note = Synthetic: TP53 reverse primer
  source 1..18: mol_type = other DNA
gtgcctgtcctgggagag

SEQ ID NO: 399 - DNA, 19 bp, synthetic construct
  misc_feature 1..19: note = Synthetic: TP53 forward primer
  source 1..19: mol_type = other DNA
ccctttcttgcggagattc

SEQ ID NO: 400 - DNA, 23 bp, synthetic construct
  misc_feature 1..23: note = Synthetic: TP53 reverse primer
  source 1..23: mol_type = other DNA
cttactgcctcttgcttctcttt

SEQ ID NO: 401 - DNA, 27 bp, synthetic construct
  misc_feature 1..27: note = Synthetic: TP53 forward primer
  source 1..27: mol_type = other DNA
tagattaccactactcaggataggaaa

SEQ ID NO: 402 - DNA, 22 bp, synthetic construct
  misc_feature 1..22: note = Synthetic: TP53 reverse primer
  source 1..22: mol_type = other DNA
gtagatggagcctggtttttta

SEQ ID NO: 403 - DNA, 26 bp, synthetic construct
  misc_feature 1..26: note = Synthetic: TP53 forward primer
  source 1..26: mol_type = other DNA
gaagaaaacggcattttgagtgttag

SEQ ID NO: 404 - DNA, 20 bp, synthetic construct
  misc_feature 1..20: note = Synthetic: TP53 reverse primer
  source 1..20: mol_type = other DNA
tccccagccaaagaagaaac

SEQ ID NO: 405 - DNA, 29 bp, synthetic construct
  misc_feature 1..29: note = Synthetic: TP53 forward primer
  source 1..29: mol_type = other DNA
ttagtacctgaagggtgaaatattctcca

SEQ ID NO: 406 - DNA, 22 bp, synthetic construct
  misc_feature 1..22: note = Synthetic: TP53 reverse primer
  source 1..22: mol_type = other DNA
cttgcctctttcctagcactgc

SEQ ID NO: 407 - DNA, 20 bp, synthetic construct
  misc_feature 1..20: note = Synthetic: TP53 forward primer
  source 1..20: mol_type = other DNA
aggagctggtgttgttgggc

SEQ ID NO: 408 - DNA, 22 bp, synthetic construct
  misc_feature 1..22: note = Synthetic: TP53 reverse primer
  source 1..22: mol_type = other DNA
gcagttatgcctcagattcact

SEQ ID NO: 409 - DNA, 23 bp, synthetic construct
  misc_feature 1..23: note = Synthetic: TP53 forward primer
  source 1..23: mol_type = other DNA
gcattgaagtctcatggaagcca

SEQ ID NO: 410 - DNA, 20 bp, synthetic construct
  misc_feature 1..20: note = Synthetic: TP53 reverse primer
  source 1..20: mol_type = other DNA
ttccgtctgggcttcttgca

SEQ ID NO: 411 - DNA, 20 bp, synthetic construct
  misc_feature 1..20: note = Synthetic: TP53 forward primer
  source 1..20: mol_type = other DNA
agacttggctgtcccagaat

SEQ ID NO: 412 - DNA, 17 bp, synthetic construct
  misc_feature 1..17: note = Synthetic: TP53 reverse primer
  source 1..17: mol_type = other DNA
cgtggcccctgcaccag

SEQ ID NO: 413 - DNA, 17 bp, synthetic construct
  misc_feature 1..17: note = Synthetic: TP53 forward primer
  source 1..17: mol_type = other DNA
aggggccgccggtgtag

SEQ ID NO: 414 - DNA, 23 bp, synthetic construct
  misc_feature 1..23: note = Synthetic: TP53 reverse primer
  source 1..23: mol_type = other DNA
ccccggacgatattgaacaatgg

SEQ ID NO: 415 - DNA, 17 bp, synthetic construct
  misc_feature 1..17: note = Synthetic: TP53 forward primer
  source 1..17: mol_type = other DNA
gagcagcctctggcatt

SEQ ID NO: 416 - DNA, 19 bp, synthetic construct
  misc_feature 1..19: note = Synthetic: TP53 reverse primer
  source 1..19: mol_type = other DNA
tgccgtcccaagcaatgga

SEQ ID NO: 417 - DNA, 20 bp, synthetic construct
  misc_feature 1..20: note = Synthetic: TP53 forward primer
  source 1..20: mol_type = other DNA
cggggacagcatcaaatcat

SEQ ID NO: 418 - DNA, 23 bp, synthetic construct
  misc_feature 1..23: note = Synthetic: TP53 reverse primer
  source 1..23: mol_type = other DNA
tgactgctcttttcacccatcta

SEQ ID NO: 419 - DNA, 17 bp, synthetic construct
  misc_feature 1..17: note = Synthetic: TP53 forward primer
  source 1..17: mol_type = other DNA
acggcaagggggactgt

SEQ ID NO: 420 - DNA, 26 bp, synthetic construct
  misc_feature 1..26: note = Synthetic: TP53 reverse primer
  source 1..26: mol_type = other DNA
cttcctgaaaacaacgttctggtaag

SEQ ID NO: 421 - DNA, 26 bp, synthetic construct
  misc_feature 1..26: note = Synthetic: TNR forward primer
  source 1..26: mol_type = other DNA
tcccataatcttcacccaaatcctag

SEQ ID NO: 422 - DNA, 20 bp, synthetic construct
  misc_feature 1..20: note = Synthetic: TNR reverse primer
  source 1..20: mol_type = other DNA
cctcctgttgcatctttcga

SEQ ID NO: 423 - DNA, 23 bp, synthetic construct
  misc_feature 1..23: note = Synthetic: TNR forward primer
  source 1..23: mol_type = other DNA
ttgggtgggtcgatatgatactc

SEQ ID NO: 424 - DNA, 22 bp, synthetic construct
  misc_feature 1..22: note = Synthetic: TNR reverse primer
  source 1..22: mol_type = other DNA
atgtgaccaaggactcagtgat

SEQ ID NO: 425 - DNA, 20 bp, synthetic construct
  misc_feature 1..20: note = Synthetic: TNR forward primer
  source 1..20: mol_type = other DNA
cagcagggagacattcccac

SEQ ID NO: 426 - DNA, 21 bp, synthetic construct
  misc_feature 1..21: note = Synthetic: TNR reverse primer
  source 1..21: mol_type = other DNA
aatcagcctcaacagcgtgcg

SEQ ID NO: 427 - DNA, 22 bp, synthetic construct
  misc_feature 1..22: note = Synthetic: TNR forward primer
  source 1..22: mol_type = other DNA
tgtgcacaagagtacagatgcg

SEQ ID NO: 428 - DNA, 21 bp, synthetic construct
  misc_feature 1..21: note = Synthetic: TNR reverse primer
  source 1..21: mol_type = other DNA
actgaacccagctaccgaata

SEQ ID NO: 429 - DNA, 17 bp, synthetic construct
  misc_feature 1..17: note = Synthetic: TNR forward primer
  source 1..17: mol_type = other DNA
tgcgagctcccggactc

SEQ ID NO: 430 - DNA, 17 bp, synthetic construct
  misc_feature 1..17: note = Synthetic: TNR reverse primer
  source 1..17: mol_type = other DNA
ctgcgagaccagtgcaa

SEQ ID NO: 431 - DNA, 21 bp, synthetic construct
  misc_feature 1..21: note = Synthetic: TNR forward primer
  source 1..21: mol_type = other DNA
cactttcttggcagcagttgg

SEQ ID NO: 432 - DNA, 18 bp, synthetic construct
  misc_feature 1..18: note = Synthetic: TNR reverse primer
  source 1..18: mol_type = other DNA
ggatcgagatgctggaga

SEQ ID NO: 433 - DNA, 19 bp, synthetic construct
  misc_feature 1..19: note = Synthetic: TNR forward primer
  source 1..19: mol_type = other DNA
cagtgtagggctcttcaca

SEQ ID NO: 434 - DNA, 17 bp, synthetic construct
  misc_feature 1..17: note = Synthetic: TNR reverse primer
  source 1..17: mol_type = other DNA
tgtggatggccagtgca

SEQ ID NO: 435 - DNA, 20 bp, synthetic construct
  misc_feature 1..20: note = Synthetic: TNR forward primer
  source 1..20: mol_type = other DNA
cagtcatccccgctgtactc

SEQ ID NO: 436 - DNA, 20 bp, synthetic construct
  misc_feature 1..20: note = Synthetic: TNR reverse primer
  source 1..20: mol_type = other DNA
tgctcggagccctactgccc

SEQ ID NO: 437 - DNA, 17 bp, synthetic construct
  misc_feature 1..17: note = Synthetic: TNR forward primer
  source 1..17: mol_type = other DNA
cccggctggagcaaccc

SEQ ID NO: 438 - DNA, 19 bp, synthetic construct
  misc_feature 1..19: note = Synthetic: TNR reverse primer
  source 1..19: mol_type = other DNA
aaggctggtttggcaagaa

SEQ ID NO: 439 - DNA, 23 bp, synthetic construct
  misc_feature 1..23: note = Synthetic: TMEM74 forward primer
  source 1..23: mol_type = other DNA
gtgctggttttcatcctgaagtt

SEQ ID NO: 440 - DNA, 24 bp, synthetic construct
  misc_feature 1..24: note = Synthetic: TMEM74 reverse primer
  source 1..24: mol_type = other DNA
gagctctatcgtcgaaacagattt

SEQ ID NO: 441 - DNA, 24 bp, synthetic construct
  misc_feature 1..24: note = Synthetic: TMEM74 forward primer
  source 1..24: mol_type = other DNA
tttgcagactctttggaagaggca

SEQ ID NO: 442 - DNA, 24 bp, synthetic construct
  misc_feature 1..24: note = Synthetic: TMEM74 reverse primer
  source 1..24: mol_type = other DNA
tcatcctgtcctgcttgttaatga

SEQ ID NO: 443 - DNA, 21 bp, synthetic construct
  misc_feature 1..21: note = Synthetic: TMEM200A forward primer
  source 1..21: mol_type = other DNA
cttgtggttcctttgcccaac

SEQ ID NO: 444 - DNA, 20 bp, synthetic construct
  misc_feature 1..20: note = Synthetic: TMEM200A reverse primer
  source 1..20: mol_type = other DNA
ctcgacaacgactccccaat

SEQ ID NO: 445 - DNA, 20 bp, synthetic construct
  misc_feature 1..20: note = Synthetic: TMEM200A forward primer
  source 1..20: mol_type = other DNA
gtcagcacagtgctaccaag

SEQ ID NO: 446 - DNA, 24 bp, synthetic construct
  misc_feature 1..24: note = Synthetic: TMEM200A reverse primer
  source 1..24: mol_type = other DNA
gagagccatagatgacttgtactg

SEQ ID NO: 447 - DNA, 19 bp, synthetic construct
  misc_feature 1..19: note = Synthetic: TMEM132D forward primer
  source 1..19: mol_type = other DNA
tacccacctcctgctggag

SEQ ID NO: 448 - DNA, 17 bp, synthetic construct
  misc_feature 1..17: note = Synthetic: TMEM132D reverse primer
  source 1..17: mol_type = other DNA
tgagcagccccctggag

SEQ ID NO: 449 - DNA, 17 bp, synthetic construct
  misc_feature 1..17: note = Synthetic: TMEM132D forward primer
  source 1..17: mol_type = other DNA
ggcacccacaccgtcat

SEQ ID NO: 450 - DNA, 17 bp, synthetic construct
  misc_feature 1..17: note = Synthetic: TMEM132D reverse primer
  source 1..17: mol_type = other DNA
tggtggtgaacttcacc

SEQ ID NO: 451 - DNA, 17 bp, synthetic construct
  misc_feature 1..17: note = Synthetic: TMEM132D forward primer
  source 1..17: mol_type = other DNA
ctgctcaggtgctggta

SEQ ID NO: 452 - DNA, 26 bp, synthetic construct
  misc_feature 1..26: note = Synthetic: TMEM132D reverse primer
  source 1..26: mol_type = other DNA
gatgtgactacgtctttgtcaatggg

SEQ ID NO: 453 - DNA, 20 bp, synthetic construct
  misc_feature 1..20: note = Synthetic: TMEM132D forward primer
  source 1..20: mol_type = other DNA
aagatgctcccgatcctctg

SEQ ID NO: 454 - DNA, 18 bp, synthetic construct
  misc_feature 1..18: note = Synthetic: TMEM132D reverse primer
  source 1..18: mol_type = other DNA
gaggggactgcgtcaggg

SEQ ID NO: 455 - DNA, 17 bp, synthetic construct
  misc_feature 1..17: note = Synthetic: TMEM132D forward primer
  source 1..17: mol_type = other DNA
tgtccggatcccattgc

SEQ ID NO: 456 - DNA, 18 bp, synthetic construct
  misc_feature 1..18: note = Synthetic: TMEM132D reverse primer
  source 1..18: mol_type = other DNA
ccccgtggagctctacta

SEQ ID NO: 457 - DNA, 17 bp, synthetic construct
  misc_feature 1..17: note = Synthetic: TMEM132D forward primer
  source 1..17: mol_type = other DNA
ctgggtgcacggtgtag

SEQ ID NO: 458 - DNA, 17 bp, synthetic construct
  misc_feature 1..17: note = Synthetic: TMEM132D reverse primer
  source 1..17: mol_type = other DNA
cccacggtggttgccgg

SEQ ID NO: 459 - DNA, 17 bp, synthetic construct
  misc_feature 1..17: note = Synthetic: TMEM132D forward primer
  source 1..17: mol_type = other DNA
gctggtccacggacttc

SEQ ID NO: 460 - DNA, 17 bp, synthetic construct
  misc_feature 1..17: note = Synthetic: TMEM132D reverse primer
  source 1..17: mol_type = other DNA
gcgtggccgagctggag

SEQ ID NO: 461 - DNA, 17 bp, synthetic construct
  misc_feature 1..17: note = Synthetic: TMEM132D forward primer
  source 1..17: mol_type = other DNA
gctgaaccagctggaca

SEQ ID NO: 462 - DNA, 21 bp, synthetic construct
  misc_feature 1..21: note = Synthetic: TMEM132D reverse primer
  source 1..21: mol_type = other DNA
ggtctttgctttccgagagac

SEQ ID NO: 463 - DNA, 27 bp, synthetic construct
  misc_feature 1..27: note = Synthetic: TMEM132B forward primer
  source 1..27: mol_type = other DNA
ctcagaccctctgactatgtctatgag

SEQ ID NO: 464 - DNA, 25 bp, synthetic construct
  misc_feature 1..25: note = Synthetic: TMEM132B reverse primer
  source 1..25: mol_type = other DNA
gtaggaagtgaacttgactctcttc

SEQ ID NO: 465 - DNA, 20 bp, synthetic construct
  misc_feature 1..20: note = Synthetic: TMEM132B forward primer
  source 1..20: mol_type = other DNA
cttcgggcccaaagaggaag

SEQ ID NO: 466 - DNA, 24 bp, synthetic construct
  misc_feature 1..24: note = Synthetic: TMEM132B reverse primer
  source 1..24: mol_type = other DNA
gacccacttgatgttatcatcgct

SEQ ID NO: 467 - DNA, 26 bp, synthetic construct
  misc_feature 1..26: note = Synthetic: TLL1 forward primer
  source 1..26: mol_type = other DNA
caccatctccactttctcttttattc

SEQ ID NO: 468 - DNA, 22 bp, synthetic construct
  misc_feature 1..22: note = Synthetic: TLL1 reverse primer
  source 1..22: mol_type = other DNA
gccgatagagattgcctgaggt

SEQ ID NO: 469 - DNA, 24 bp, synthetic construct
  misc_feature 1..24: note = Synthetic: TIMP3 forward primer
  source 1..24: mol_type = other DNA
tgtgacttccaagaacgagtgtct

SEQ ID NO: 470 - DNA, 17 bp, synthetic construct
  misc_feature 1..17: note = Synthetic: TIMP3 reverse primer
  source 1..17: mol_type = other DNA
ggcccatcctcggtacc

SEQ ID NO: 471 - DNA, 17 bp, synthetic construct
  misc_feature 1..17: note = Synthetic: TIMP3 forward primer
  source 1..17: mol_type = other DNA
agggcggctactgcagc

SEQ ID NO: 472 - DNA, 24 bp, synthetic construct
  misc_feature 1..24: note = Synthetic: TIMP3 reverse primer
  source 1..24: mol_type = other DNA
ctgtggcattgatgatgcttttat

SEQ ID NO: 473 - DNA, 25 bp, synthetic construct
  misc_feature 1..25: note = Synthetic: THSD7B forward primer
  source 1..25: mol_type = other DNA
ggcttgattgtgcattaatcaccaa

SEQ ID NO: 474 - DNA, 26 bp, synthetic construct
  misc_feature 1..26: note = Synthetic: THSD7B reverse primer
  source 1..26: mol_type = other DNA
ttcacaagacttcctctcaggaggag

SEQ ID NO: 475 - DNA, 22 bp, synthetic construct
  misc_feature 1..22: note = Synthetic: THSD7B forward primer
  source 1..22: mol_type = other DNA
tcagggagtctttgcccagttc

SEQ ID NO: 476 - DNA, 21 bp, synthetic construct
  misc_feature 1..21: note = Synthetic: THSD7B reverse primer
  source 1..21: mol_type = other DNA
gggaacaggatgaccactccg

SEQ ID NO: 477 - DNA, 25 bp, synthetic construct
  misc_feature 1..25: note = Synthetic: THSD7B forward primer
  source 1..25: mol_type = other DNA
cctctagtggagacagaactatgtc

SEQ ID NO: 478 - DNA, 19 bp, synthetic construct
  misc_feature 1..19: note = Synthetic: THSD7B reverse primer
  source 1..19: mol_type = other DNA
ggctcccttctgccttctg

SEQ ID NO: 479 - DNA, 24 bp, synthetic construct
  misc_feature 1..24: note = Synthetic: THSD7B forward primer
  source 1..24: mol_type = other DNA
accttatggaaactggtcagattg

SEQ ID NO: 480 - DNA, 22 bp, synthetic construct
  misc_feature 1..22: note = Synthetic: THSD7B reverse primer
  source 1..22: mol_type = other DNA
ttgctgtctgcttgtacccgca

SEQ ID NO: 481 - DNA, 30 bp, synthetic construct
  misc_feature 1..30: note = Synthetic: THSD7B forward primer
  source 1..30: mol_type = other DNA
cttcattgatcaatgcttattctaagtgag

SEQ ID NO: 482 - DNA, 21 bp, synthetic construct
  misc_feature 1..21: note = Synthetic: THSD7B reverse primer
  source 1..21: mol_type = other DNA
ggcaccatacagttcgttcgt

SEQ ID NO: 483 - DNA, 25 bp, synthetic construct
  misc_feature 1..25: note = Synthetic: THSD7B forward primer
  source 1..25: mol_type = other DNA
catggaaagcaagtctttggaacaa

SEQ ID NO: 484 - DNA, 24 bp, synthetic construct
  misc_feature 1..24: note = Synthetic: THSD7B reverse primer
  source 1..24: mol_type = other DNA
aggaatacctgtgacattaacgcc

SEQ ID NO: 485 - DNA, 20 bp, synthetic construct
  misc_feature 1..20: note = Synthetic: THSD7A forward primer
  source 1..20: mol_type = other DNA
agctttggcacgcttgaggt

SEQ ID NO: 486 - DNA, 20 bp, synthetic construct
  misc_feature 1..20: note = Synthetic: THSD7A reverse primer
  source 1..20: mol_type = other DNA
attcagctgccagccaacgg

SEQ ID NO: 487 - DNA, 25 bp, synthetic construct
  misc_feature 1..25: note = Synthetic: THSD7A forward primer
  source 1..25: mol_type = other DNA
tctcttcatagaggggatctgtgca

SEQ ID NO: 488 - DNA, 23 bp, synthetic construct
  misc_feature 1..23: note = Synthetic: THSD7A reverse primer
  source 1..23: mol_type = other DNA
agtatcaggaagcagtctaggca

SEQ ID NO: 489 - DNA, 22 bp, synthetic construct
  misc_feature 1..22: note = Synthetic: THSD7A forward primer
  source 1..22: mol_type = other DNA
ctctggtctgatatccaatctg

SEQ ID NO: 490 - DNA, 18 bp, synthetic construct
  misc_feature 1..18: note = Synthetic: THSD7A reverse primer
  source 1..18: mol_type = other DNA
ggaaaaggaccgcagcaa

SEQ ID NO: 491 - DNA, 21 bp, synthetic construct
  misc_feature 1..21: note = Synthetic: THSD7A forward primer
  source 1..21: mol_type = other DNA
gggcttctggatcctttactc

SEQ ID NO: 492 - DNA, 22 bp, synthetic construct
  misc_feature 1..22: note = Synthetic: THSD7A reverse primer
  source 1..22: mol_type = other DNA
ctcccgacaagtaagacaagca

SEQ ID NO: 493 - DNA, 27 bp, synthetic construct
  misc_feature 1..27: note = Synthetic: TGS1 forward primer
  source 1..27: mol_type = other DNA
gagatttctttccctctaaactgatgg

SEQ ID NO: 494 - DNA, 25 bp, synthetic construct
  misc_feature 1..25: note = Synthetic: TGS1 reverse primer
  source 1..25: mol_type = other DNA
ttgccactgtctctgatgtaatagc

SEQ ID NO: 495 - DNA, 29 bp, synthetic construct
  misc_feature 1..29: note = Synthetic: TGS1 forward primer
  source 1..29: mol_type = other DNA
gatcgaaaattgtacaatttgggattaaa

SEQ ID NO: 496 - DNA, 31 bp, synthetic construct
  misc_feature 1..31: note = Synthetic: TGS1 reverse primer
  source 1..31: mol_type = other DNA
ataaattaacacattatggctaatttcagca

SEQ ID NO: 497 - DNA, 21 bp, synthetic construct
  misc_feature 1..21: note = Synthetic: TGFBR2 forward primer
  source 1..21: mol_type = other DNA
tgagacgttgactgagtgctg

SEQ ID NO: 498 - DNA, 20 bp, synthetic construct
  misc_feature 1..20: note = Synthetic: TGFBR2 reverse primer
  source 1..20: mol_type = other DNA
gctcactgaagcgttctgcc

SEQ ID NO: 499 - DNA, 27 bp, synthetic construct
  misc_feature 1..27: note = Synthetic: TGFBR1 forward primer
  source 1..27: mol_type = other DNA
aacaattgcgagaactattgtgttaca

SEQ ID NO: 500 - DNA, 21 bp, synthetic construct
  misc_feature 1..21: note = Synthetic: TGFBR1 reverse primer
  source 1..21: mol_type = other DNA
gaaccacgaacgttcttctct

SEQ ID NO: 501 - DNA, 26 bp, synthetic construct
  misc_feature 1..26: note = Synthetic: TGFBR1 forward primer
  source 1..26: mol_type = other DNA
ggagaagaagttgctgttaagatatt

SEQ ID NO: 502 - DNA, 24 bp, synthetic construct
  misc_feature 1..24: note = Synthetic: TGFBR1 reverse primer
  source 1..24: mol_type = other DNA
caggatgttttcatgacgtaacat

SEQ ID NO: 503 - DNA, 21 bp, synthetic construct
  misc_feature 1..21: note = Synthetic: TFAP2D forward primer
  source 1..21: mol_type = other DNA
ggtcaaccccacagacttatt

SEQ ID NO: 504 - DNA, 19 bp, synthetic construct
  misc_feature 1..19: note = Synthetic: TFAP2D reverse primer
  source 1..19: mol_type = other DNA
ggagaggcgcctctttacc

SEQ ID NO: 505 - DNA, 24 bp, synthetic construct
  misc_feature 1..24: note = Synthetic: TFAP2D forward primer
  source 1..24: mol_type = other DNA
ccaaatacaaggtgaccattgctg

SEQ ID NO: 506 - DNA, 24 bp, synthetic construct
  misc_feature 1..24: note = Synthetic: TFAP2D reverse primer
  source 1..24: mol_type = other DNA
taccttctcaaaatgcctcccaag

SEQ ID NO: 507 - DNA, 24 bp, synthetic construct
  misc_feature 1..24: note = Synthetic: TEKT3 forward primer
  source 1..24: mol_type = other DNA
gtcttgaatcaggcgagatgtatc

SEQ ID NO: 508 - DNA, 19 bp, synthetic construct
  misc_feature 1..19: note = Synthetic: TEKT3 reverse primer
  source 1..19: mol_type = other DNA
caccggatgactggtacag

SEQ ID NO: 509 - DNA, 33 bp, synthetic construct
  misc_feature 1..33: note = Synthetic: TECRL forward primer
  source 1..33: mol_type = other DNA
atgttgctgttttctataggagataagattctt

SEQ ID NO: 510 - DNA, 30 bp, synthetic construct
  misc_feature 1..30: note = Synthetic: TECRL reverse primer
  source 1..30: mol_type = other DNA
tgggcacaaaagaaacataagatttatctg

SEQ ID NO: 511 - DNA, 32 bp, synthetic construct
  misc_feature 1..32: note = Synthetic: TECRL forward primer
  source 1..32: mol_type = other DNA
cacatgcatttagtatatcatgaataggattc

SEQ ID NO: 512 - DNA, 26 bp, synthetic construct
  misc_feature 1..26: note = Synthetic: TECRL reverse primer
  source 1..26: mol_type = other DNA
ccaagtccaaattataaccccttcac

SEQ ID NO: 513 - DNA, 27 bp, synthetic construct
  misc_feature 1..27: note = Synthetic: TECRL forward primer
  source 1..27: mol_type = other DNA
tgtagttaggacatgaaaccaggaaaa

SEQ ID NO: 514 - DNA, 27 bp, synthetic construct
  misc_feature 1..27: note = Synthetic: TECRL reverse primer
  source 1..27: mol_type = other DNA
ctttgaaaaaggaaacaatgcctgttt

SEQ ID NO: 515 - DNA, 23 bp, synthetic construct
  misc_feature 1..23: note = Synthetic: TEAD2 forward primer
  source 1..23: mol_type = other DNA
cacaggatttgtgagcacttttg

SEQ ID NO: 516 - DNA, 21 bp, synthetic construct
  misc_feature 1..21: note = Synthetic: TEAD2 reverse primer
  source 1..21: mol_type = other DNA
gcctccgagagctatatgatc

SEQ ID NO: 517 - DNA, 20 bp, synthetic construct
  misc_feature 1..20: note = Synthetic: TCHH forward primer
  source 1..20: mol_type = other DNA
gttcctgatggcgcagttcc

SEQ ID NO: 518 - DNA, 20 bp, synthetic construct
  misc_feature 1..20: note = Synthetic: TCHH reverse primer
  source 1..20: mol_type = other DNA
gaacagctgctccaggaaag

SEQ ID NO: 519 - DNA, 25 bp, synthetic construct
  misc_feature 1..25: note = Synthetic: TCF7L2 forward primer
  source 1..25: mol_type = other DNA
gccctctattcacagataactctct

SEQ ID NO: 520 - DNA, 23 bp, synthetic construct
  misc_feature 1..23: note = Synthetic: TCF7L2 reverse primer
  source 1..23: mol_type = other DNA
tgccttcaccttgtatgtagcga

SEQ ID NO: 521 - DNA, 19 bp, synthetic construct
  misc_feature 1..19: note = Synthetic: TBL1XR1 forward primer
  source 1..19: mol_type = other DNA
gacaccgccaacccatttc

SEQ ID NO: 522 - DNA, 21 bp, synthetic construct
  misc_feature 1..21: note = Synthetic: TBL1XR1 reverse primer
  source 1..21: mol_type = other DNA
gacccaactggcaatctcttg

SEQ ID NO: 523 - DNA, 23 bp, synthetic construct
  misc_feature 1..23: note = Synthetic: TBL1XR1 forward primer
  source 1..23: mol_type = other DNA
actcacctgactcttgcaagtat

SEQ ID NO: 524 - DNA, 25 bp, synthetic construct
  misc_feature 1..25: note = Synthetic: TBL1XR1 reverse primer
  source 1..25: mol_type = other DNA
gtgttgtgacctcatggtttaagtg

SEQ ID NO: 525 - DNA, 26 bp, synthetic construct
  misc_feature 1..26: note = Synthetic: TAOK3 forward primer
  source 1..26: mol_type = other DNA
agcaccatagttgagttcatgtatgc

SEQ ID NO: 526 - DNA, 25 bp, synthetic construct
  misc_feature 1..25: note = Synthetic: TAOK3 reverse primer
  source 1..25: mol_type = other DNA
ctagctgattttggatctgcttcaa

SEQ ID NO: 527 - DNA, 20 bp, synthetic construct
  misc_feature 1..20: note = Synthetic: TAOK3 forward primer
  source 1..20: mol_type = other DNA
cgaaggagttggcaggagaa

SEQ ID NO: 528 - DNA, 23 bp, synthetic construct
  misc_feature 1..23: note = Synthetic: TAOK3 reverse primer
  source 1..23: mol_type = other DNA
tctaacagagccaggtcaggtaa

SEQ ID NO: 529 - DNA, 21 bp, synthetic construct
  misc_feature 1..21: note = Synthetic: SYNE1 forward primer
  source 1..21: mol_type = other DNA
attgacttggcctgctgttga

SEQ ID NO: 530 - DNA, 29 bp, synthetic construct
  misc_feature 1..29: note = Synthetic: SYNE1 reverse primer
  source 1..29: mol_type = other DNA
aggagttttctaaacggacagaaagtatt

SEQ ID NO: 531 - DNA, 22 bp, synthetic construct
  misc_feature 1..22: note = Synthetic: SYNE1 forward primer
  source 1..22: mol_type = other DNA
acaaggttctcagcctggactg

SEQ ID NO: 532 - DNA, 27 bp, synthetic construct
  misc_feature 1..27: note = Synthetic: SYNE1 reverse primer
  source 1..27: mol_type = other DNA
gcactttatttgagggcagagataaat

SEQ ID NO: 533 - DNA, 23 bp, synthetic construct
  misc_feature 1..23: note = Synthetic: SYNE1 forward primer
  source 1..23: mol_type = other DNA
aaacacttggcggtagtgatttt

SEQ ID NO: 534 - DNA, 23 bp, synthetic construct
  misc_feature 1..23: note = Synthetic: SYNE1 reverse primer
  source 1..23: mol_type = other DNA
gctgccagaataaagaacagatt

SEQ ID NO: 535 - DNA, 23 bp, synthetic construct
  misc_feature 1..23: note = Synthetic: SYNE1 forward primer
  source 1..23: mol_type = other DNA
tccctgaaggcctttcgaaatct

SEQ ID NO: 536 - DNA, 25 bp, synthetic construct
  misc_feature 1..25: note = Synthetic: SYNE1 reverse primer
  source 1..25: mol_type = other DNA
cttttcagtctttgtttgcaagcat

SEQ ID NO: 537 - DNA, 27 bp, synthetic construct
  misc_feature 1..27: note = Synthetic: SVIL forward primer
  source 1..27: mol_type = other DNA
cagtaaaagtgacttactttgcacatt

SEQ ID NO: 538 - DNA, 20 bp, synthetic construct
  misc_feature 1..20: note = Synthetic: SVIL reverse primer
  source 1..20: mol_type = other DNA
caggttctccagggaaagga

SEQ ID NO: 539 - DNA, 18 bp, synthetic construct
  misc_feature 1..18: note = Synthetic: SVIL forward primer
  source 1..18: mol_type = other DNA
ccctggaaacactgcagg

SEQ ID NO: 540 - DNA, 28 bp, synthetic construct
  misc_feature 1..28: note = Synthetic: SVIL reverse primer
  source 1..28: mol_type = other DNA
cccttacctatttacctctgtttaaatc

SEQ ID NO: 541 - DNA, 22 bp, synthetic construct
  misc_feature 1..22: note = Synthetic: SV2C forward primer
  source 1..22: mol_type = other DNA
ccatcttctcattggccatcag

SEQ ID NO: 542 - DNA, 20 bp, synthetic construct
  misc_feature 1..20: note = Synthetic: SV2C reverse primer
  source 1..20: mol_type = other DNA
caatgtccttggcacccttc

SEQ ID NO: 543 - DNA, 26 bp, synthetic construct
  misc_feature 1..26: note = Synthetic: SV2C forward primer
  source 1..26: mol_type = other DNA
aagactcttacaaggataggacttca

SEQ ID NO: 544 - DNA, 19 bp, synthetic construct
  misc_feature 1..19: note = Synthetic: SV2C reverse primer
  source 1..19: mol_type = other DNA
cggtccacagcttgattca

SEQ ID NO: 545 - DNA, 24 bp, synthetic construct
  misc_feature 1..24: note = Synthetic: SV2A forward primer
  source 1..24: mol_type = other DNA
aggatggcttcatactgttgggcc

SEQ ID NO: 546 - DNA, 17 bp, synthetic construct
  misc_feature 1..17: note = Synthetic: SV2A reverse primer
  source 1..17: mol_type = other DNA
cctggctggagtaaggg

SEQ ID NO: 547 - DNA, 23 bp, synthetic construct
  misc_feature 1..23: note = Synthetic: SUPT20H forward primer
  source 1..23: mol_type = other DNA
ctgcctgtgactgcataaaactt

SEQ ID NO: 548 - DNA, 22 bp, synthetic construct
  misc_feature 1..22: note = Synthetic: SUPT20H reverse primer
  source 1..22: mol_type = other DNA
tctgagcaaggttcaaccagtc

SEQ ID NO: 549 - DNA, 24 bp, synthetic construct
  misc_feature 1..24: note = Synthetic: STXBP5L forward primer
  source 1..24: mol_type = other DNA
tcagagttgcagttctggaaaacg

SEQ ID NO: 550 - DNA, 21 bp, synthetic construct
  misc_feature 1..21: note = Synthetic: STXBP5L reverse primer
  source 1..21: mol_type = other DNA
gcctttcgaaatggtggtctt

SEQ ID NO: 551 - DNA, 22 bp, synthetic construct
  misc_feature 1..22: note = Synthetic: STXBP5L forward primer
  source 1..22: mol_type = other DNA
gtaaatcgctggggtcctggaa

SEQ ID NO: 552 - DNA, 32 bp, synthetic construct
  misc_feature 1..32: note = Synthetic: STXBP5L reverse primer
  source 1..32: mol_type = other DNA
taacataccttctgttgtaactggtaaagaaa

SEQ ID NO: 553 - DNA, 19 bp, synthetic construct
  misc_feature 1..19: note = Synthetic: STK11 forward primer
  source 1..19: mol_type = other DNA
cgactccaccgaggtcatc

SEQ ID NO: 554 - DNA, 17 bp, synthetic construct
  misc_feature 1..17: note = Synthetic: STK11 reverse primer
  source 1..17: mol_type = other DNA
cacagcgtctccgagtc

SEQ ID NO: 555 - DNA, 17 bp, synthetic construct
  misc_feature 1..17: note = Synthetic: STK11 forward primer
  source 1..17: mol_type = other DNA
gacctgctgggggaagg

SEQ ID NO: 556 - DNA, 19 bp, synthetic construct
  misc_feature 1..19: note = Synthetic: STK11 reverse primer
  source 1..19: mol_type = other DNA
gttggggatccttcgcaac

SEQ ID NO: 557 - DNA, 17 bp, synthetic construct
  misc_feature 1..17: note = Synthetic: STK11 forward primer
  source 1..17: mol_type = other DNA
gcaggagggccgtcaag

SEQ ID NO: 558 - DNA, 25 bp, synthetic construct
  misc_feature 1..25: note = Synthetic: STK11 reverse primer
  source 1..25: mol_type = other DNA
gccatacttacttcttcacgttggc

SEQ ID NO: 559 - DNA, 18 bp, synthetic construct
  misc_feature 1..18: note = Synthetic: STK11 forward primer
  source 1..18: mol_type = other DNA
attgccaacggcctggac

SEQ ID NO: 560 - DNA, 18 bp, synthetic construct
  misc_feature 1..18: note = Synthetic: STK11 reverse primer
  source 1..18: mol_type = other DNA
gtgcgtgtggtgagtgcc

SEQ ID NO: 561 - DNA, 20 bp, synthetic construct
  misc_feature 1..20: note = Synthetic: STEAP4 forward primer
  source 1..20: mol_type = other DNA
tcctggcaccaaatgagcaa

SEQ ID NO: 562 - DNA, 25 bp, synthetic construct
  misc_feature 1..25: note = Synthetic: STEAP4 reverse primer
  source 1..25: mol_type = other DNA
gagcattatgattttctcacagaat

SEQ ID NO: 563 - DNA, 30 bp, synthetic construct
  misc_feature 1..30: note = Synthetic: STEAP4 forward primer
  source 1..30: mol_type = other DNA
atatttttccattgagaacctcagttaatt

SEQ ID NO: 564 - DNA, 24 bp, synthetic construct
  misc_feature 1..24: note = Synthetic: STEAP4 reverse primer
  source 1..24: mol_type = other DNA
tgcagaagtcttgagctattcaga

SEQ ID NO: 565 - DNA, 19 bp, synthetic construct
  misc_feature 1..19: note = Synthetic: ST6GALNAC3 forward primer
  source 1..19: mol_type = other DNA
aagatgtcggccgcatgac

SEQ ID NO: 566 - DNA, 31 bp, synthetic construct
  misc_feature 1..31: note = Synthetic: ST6GALNAC3 reverse primer
  source 1..31: mol_type = other DNA
tccccaaataacataaatagtagtattcgct

SEQ ID NO: 567 - DNA, 24 bp, synthetic construct
  misc_feature 1..24: note = Synthetic: ST6GALNAC3 forward primer
  source 1..24: mol_type = other DNA
gcgttcctcttttgctaaaaaacc

SEQ ID NO: 568 - DNA, 25 bp, synthetic construct
  misc_feature 1..25: note = Synthetic: ST6GALNAC3 reverse primer
  source 1..25: mol_type = other DNA
tctttcctcatattgcggaaaggtc

SEQ ID NO: 569 - DNA, 19 bp, synthetic construct
  misc_feature 1..19: note = Synthetic: ST6GAL2 forward primer
  source 1..19: mol_type = other DNA
ttgggactgggcccatttc

SEQ ID NO: 570 - DNA, 17 bp, synthetic construct
  misc_feature 1..17: note = Synthetic: ST6GAL2 reverse primer
  source 1..17: mol_type = other DNA
catgggcgccgcacatg

SEQ ID NO: 571 - DNA, 24 bp, synthetic construct
  misc_feature 1..24: note = Synthetic: SPTA1 forward primer
  source 1..24: mol_type = other DNA
atttcccaccaataagtagcctgc

SEQ ID NO: 572 - DNA, 27 bp, synthetic construct
  misc_feature 1..27: note = Synthetic: SPTA1 reverse primer
  source 1..27: mol_type = other DNA
cagatccaggagatgaaagaagatctg

SEQ ID NO: 573 - DNA, 20 bp, synthetic construct
  misc_feature 1..20: note = Synthetic: SPTA1 forward primer
  source 1..20: mol_type = other DNA
cgaatatgctcccagctgga

SEQ ID NO: 574 - DNA, 24 bp, synthetic construct
  misc_feature 1..24: note = Synthetic: SPTA1 reverse primer
  source 1..24: mol_type = other DNA
acactttcccatccttcagatgca

SEQ ID NO: 575 - DNA, 26 bp, synthetic construct
  misc_feature 1..26: note = Synthetic: SPTA1 forward primer
  source 1..26: mol_type = other DNA
tcttcatcagcaccatagttagtatt

SEQ ID NO: 576 - DNA, 23 bp, synthetic construct
  misc_feature 1..23: note = Synthetic: SPTA1 reverse primer
  source 1..23: mol_type = other DNA
gacaaaatgatcttgaagccaat

SEQ ID NO: 577 - DNA, 21 bp, synthetic construct
  misc_feature 1..21: note = Synthetic: SPTA1 forward primer
  source 1..21: mol_type = other DNA
gtactgctggaactggacatt

SEQ ID NO: 578 - DNA, 24 bp, synthetic construct
  misc_feature 1..24: note = Synthetic: SPTA1 reverse primer
  source 1..24: mol_type = other DNA
tctagggtcaagagtttgaaccag

SEQ ID NO: 579 - DNA, 28 bp, synthetic construct
  misc_feature 1..28: note = Synthetic: SPOP forward primer
  source 1..28: mol_type = other DNA
gtatgaaacttctggatgtgaaacttaa

SEQ ID NO: 580 - DNA, 26 bp, synthetic construct
  misc_feature 1..26: note = Synthetic: SPOP reverse primer
  source 1..26: mol_type = other DNA
aagttcgggcaaaattcaaattctcc

SEQ ID NO: 581 - DNA, 23 bp, synthetic construct
  misc_feature 1..23: note = Synthetic: SPOP forward primer
  source 1..23: mol_type = other DNA
ttggtttcttctcccttggcatt

SEQ ID NO: 582 - DNA, 28 bp, synthetic construct
  misc_feature 1..28: note = Synthetic: SPOP reverse primer
  source 1..28: mol_type = other DNA
aaagcaaagattacctgtcactttacct

SEQ ID NO: 583 - DNA, 22 bp, synthetic construct
  misc_feature 1..22: note = Synthetic: SPOP forward primer
  source 1..22: mol_type = other DNA
gggtaagcttgtcatcagggag

SEQ ID NO: 584 - DNA, 26 bp, synthetic construct
  misc_feature 1..26: note = Synthetic: SPOP reverse primer
  source 1..26: mol_type = other DNA
atataggtttgtgcaaggcaaagact

SEQ ID NO: 585 - DNA, 27 bp, synthetic construct
  misc_feature 1..27: note = Synthetic: SPOP forward primer
  source 1..27: mol_type = other DNA
ctctacggatgaatttcttgaatcccc

SEQ ID NO: 586 - DNA, 25 bp, synthetic construct
  misc_feature 1..25: note = Synthetic: SPOP reverse primer
  source 1..25: mol_type = other DNA
gctttgatctggtttttgcgtaacc

SEQ ID NO: 587 - DNA, 20 bp, synthetic construct
  misc_feature 1..20: note = Synthetic: SPATA17 forward primer
  source 1..20: mol_type = other DNA
gcccttccgagatatcaccg

SEQ ID NO: 588 - DNA, 25 bp, synthetic construct
  misc_feature 1..25: note = Synthetic: SPATA17 reverse primer
  source 1..25: mol_type = other DNA
taactcatcgattggttctgccacc

SEQ ID NO: 589 - DNA, 24 bp, synthetic construct
  misc_feature 1..24: note = Synthetic: SPATA17 forward primer
  source 1..24: mol_type = other DNA
agaacaacgctacaggcctttgga

SEQ ID NO: 590 - DNA, 26 bp, synthetic construct
  misc_feature 1..26: note = Synthetic: SPATA17 reverse primer
  source 1..26: mol_type = other DNA
catttacattttgcagccattcctct

SEQ ID NO: 591 - DNA, 22 bp, synthetic construct
  misc_feature 1..22: note = Synthetic: SOX9 forward primer
  source 1..22: mol_type = other DNA
acttctgaacgagagcgagaag

SEQ ID NO: 592 - DNA, 21 bp, synthetic construct
  misc_feature 1..21: note = Synthetic: SOX9 reverse primer
  source 1..21: mol_type = other DNA
cggctggtacttgtaatccgg

SEQ ID NO: 593 - DNA, 18 bp, synthetic construct
  misc_feature 1..18: note = Synthetic: SOX9 forward primer
  source 1..18: mol_type = other DNA
cgcgtgcagcacaagaag

SEQ ID NO: 594 - DNA, 19 bp, synthetic construct
  misc_feature 1..19: note = Synthetic: SOX9 reverse primer
  source 1..19: mol_type = other DNA
cccgttcttcaccgacttc

SEQ ID NO: 595 - DNA, 17 bp, synthetic construct
  misc_feature 1..17: note = Synthetic: SOX9 forward primer
  source 1..17: mol_type = other DNA
cacccaccacccccaaa

SEQ ID NO: 596 - DNA, 20 bp, synthetic construct
  misc_feature 1..20: note = Synthetic: SOX9 reverse primer
  source 1..20: mol_type = other DNA
agtcgatagggggctgtctg

SEQ ID NO: 597 - DNA, 19 bp, synthetic construct
  misc_feature 1..19: note = Synthetic: SOX9 forward primer
  source 1..19: mol_type = other DNA
ggctgacctgaagcgagag

SEQ ID NO: 598 - DNA, 21 bp, synthetic construct
  misc_feature 1..21: note = Synthetic: SOX9 reverse primer
  source 1..21: mol_type = other DNA
atgttggagatgacgtcgctg

SEQ ID NO: 599 - DNA, 17 bp, synthetic construct
  misc_feature 1..17: note = Synthetic: SORL1 forward primer
  source 1..17: mol_type = other DNA
gctgtgcctgcccaagg

SEQ ID NO: 600 - DNA, 19 bp, synthetic construct
  misc_feature 1..19: note = Synthetic: SORL1 reverse primer
  source 1..19: mol_type = other DNA
gtcccctgatggaagcaca

SEQ ID NO: 601 - DNA, 20 bp, synthetic construct
  misc_feature 1..20: note = Synthetic: SORL1 forward primer
  source 1..20: mol_type = other DNA
gtccagaggatgtgtccagc

SEQ ID NO: 602 - DNA, 27 bp, synthetic construct
  misc_feature 1..27: note = Synthetic: SORL1 reverse primer
  source 1..27: mol_type = other DNA
acaggtattgttcttgagctgatagcc

SEQ ID NO: 603 - DNA, 21 bp, synthetic construct
  misc_feature 1..21: note = Synthetic: SORCS1 forward primer
  source 1..21: mol_type = other DNA
tcccaagctgcaatcctttga

SEQ ID NO: 604 - DNA, 25 bp, synthetic construct
  misc_feature 1..25: note = Synthetic: SORCS1 reverse primer
  source 1..25: mol_type = other DNA
ctaacagcgactatggttatgagcg

SEQ ID NO: 605 - DNA, 18 bp, synthetic construct
  misc_feature 1..18: note = Synthetic: SORCS1 forward primer
  source 1..18: mol_type = other DNA
ctggccattgctgtgtcg

SEQ ID NO: 606 - DNA, 27 bp, synthetic construct
  misc_feature 1..27: note = Synthetic: SORCS1 reverse primer
  source 1..27: mol_type = other DNA
tttgccacctagtgaaaggtttttctc

SEQ ID NO: 607 - DNA, 20 bp, synthetic construct
  misc_feature 1..20: note = Synthetic: SORCS1 forward primer
  source 1..20: mol_type = other DNA
aagtgagggtgcccacttgg

SEQ ID NO: 608 - DNA, 22 bp, synthetic construct
  misc_feature 1..22: note = Synthetic: SORCS1 reverse primer
  source 1..22: mol_type = other DNA
ctcttccctttgtcaccacaaa

SEQ ID NO: 609 - DNA, 21 bp, synthetic construct
  misc_feature 1..21: note = Synthetic: SORCS1 forward primer
  source 1..21: mol_type = other DNA
tcgcattgacctctttgttct

SEQ ID NO: 610 - DNA, 22 bp, synthetic construct
  misc_feature 1..22: note = Synthetic: SORCS1 reverse primer
  source 1..22: mol_type = other DNA
tttctcttgtgcctcaggtccc

SEQ ID NO: 611 - DNA, 25 bp, synthetic construct
  misc_feature 1..25: note = Synthetic: SNAPC1 forward primer
  source 1..25: mol_type = other DNA
gatcagagttggtgctttgtatctg

SEQ ID NO: 612 - DNA, 29 bp, synthetic construct
  misc_feature 1..29: note = Synthetic: SNAPC1 reverse primer
  source 1..29: mol_type = other DNA
acttgttttacatttctgctaaggaaaaa

SEQ ID NO: 613 - DNA, 17 bp, synthetic construct
  misc_feature 1..17: note = Synthetic: SMPD4P2 forward primer
  source 1..17: mol_type = other DNA
acaaaggcccgcttggc

SEQ ID NO: 614 - DNA, 19 bp, synthetic construct
  misc_feature 1..19: note = Synthetic: SMPD4P2 reverse primer
  source 1..19: mol_type = other DNA
atgctgagcaacaccacgg

SEQ ID NO: 615 - DNA, 25 bp, synthetic construct
  misc_feature 1..25: note = Synthetic: SMARCA4 forward primer
  source 1..25: mol_type = other DNA
tgaatgaggaggaaaccattctcat

SEQ ID NO: 616 - DNA, 23 bp, synthetic construct
  misc_feature 1..23: note = Synthetic: SMARCA4 reverse primer
  source 1..23: mol_type = other DNA
cgacttccttcttgagtcgtcgg

SEQ ID NO: 617 - DNA, 17 bp, synthetic construct
  misc_feature 1..17: note = Synthetic: SMARCA4 forward primer
  source 1..17: mol_type = other DNA
tgctgcggcccttcttg

SEQ ID NO: 618 - DNA, 21 bp, synthetic construct
  misc_feature 1..21: note = Synthetic: SMARCA4 reverse primer
  source 1..21: mol_type = other DNA
atcaccttttcgggcaactgg

SEQ ID NO: 619 - DNA, 20 bp, synthetic construct
  misc_feature 1..20: note = Synthetic: SMARCA4 forward primer
  source 1..20: mol_type = other DNA
ccggctctgagtacttcatc

SEQ ID NO: 620 - DNA, 25 bp, synthetic construct
  misc_feature 1..25: note = Synthetic: SMARCA4 reverse primer
  source 1..25: mol_type = other DNA
ctgtcaaaaatgatcacagtgtctg

SEQ ID NO: 621 - DNA, 17 bp, synthetic construct
  misc_feature 1..17: note = Synthetic: SMARCA4 forward primer
  source 1..17: mol_type = other DNA
cggcctgaacctccagt

SEQ ID NO: 622 - DNA, 23 bp, synthetic construct
  misc_feature 1..23: note = Synthetic: SMARCA4 reverse primer
  source 1..23: mol_type = other DNA
cttttacctggtgaggattccag

SEQ ID NO: 623 - DNA, 20 bp, synthetic construct
  misc_feature 1..20: note = Synthetic: SMARCA4 forward primer
  source 1..20: mol_type = other DNA
acacctctccagctagtgtc

SEQ ID NO: 624 - DNA, 17 bp, synthetic construct
  misc_feature 1..17: note = Synthetic: SMARCA4 reverse primer
  source 1..17: mol_type = other DNA
ctgctgcccgatgcggt

SEQ ID NO: 625 - DNA, 17 bp, synthetic construct
  misc_feature 1..17: note = Synthetic: SMARCA4 forward primer
  source 1..17: mol_type = other DNA
aagcgcaggaccgagcc

SEQ ID NO: 626 - DNA, 17 bp, synthetic construct
  misc_feature 1..17: note = Synthetic: SMARCA4 reverse primer
  source 1..17: mol_type = other DNA
agcacacgcacctcgtt

SEQ ID NO: 627 - DNA, 17 bp, synthetic construct
  misc_feature 1..17: note = Synthetic: SMARCA4 forward primer
  source 1..17: mol_type = other DNA
ctctgcaccgtcaacag

SEQ ID NO: 628 - DNA, 21 bp, synthetic construct
  misc_feature 1..21: note = Synthetic: SMARCA4 reverse primer
  source 1..21: mol_type = other DNA
acttctggtcgaacatgccgg

SEQ ID NO: 629 - DNA, 20 bp, synthetic construct
  misc_feature 1..20: note = Synthetic: SMARCA4 forward primer
  source 1..20: mol_type = other DNA
tggaccagaaggtgatccag

SEQ ID NO: 630 - DNA, 19 bp, synthetic construct
  misc_feature 1..19: note = Synthetic: SMARCA4 reverse primer
  source 1..19: mol_type = other DNA
ctcatcctgctcctcgtgc

SEQ ID NO: 631 - DNA, 31 bp, synthetic construct
  misc_feature 1..31: note = Synthetic: SMAD4 forward primer
  source 1..31: mol_type = other DNA
agcatgctatacaatctgaactaaaatttaa

SEQ ID NO: 632 - DNA, 21 bp, synthetic construct
  misc_feature 1..21: note = Synthetic: SMAD4 reverse primer
  source 1..21: mol_type = other DNA
ctaaggcacctgacccaaaca

SEQ ID NO: 633 - DNA, 23 bp, synthetic construct
  misc_feature 1..23: note = Synthetic: SMAD4 forward primer
  source 1..23: mol_type = other DNA
tgtgcagttggaatgtaaaggtg

SEQ ID NO: 634 - DNA, 21 bp, synthetic construct
  misc_feature 1..21: note = Synthetic: SMAD4 reverse primer
  source 1..21: mol_type = other DNA
ccagcttctctgtctaagtag

SEQ ID NO: 635 - DNA, 30 bp, synthetic construct
  misc_feature 1..30: note = Synthetic: SMAD4 forward primer
  source 1..30: mol_type = other DNA
gagttttaaataagtcaggcattggttttt

SEQ ID NO: 636 - DNA, 17 bp, synthetic construct
  misc_feature 1..17: note = Synthetic: SMAD4 reverse primer
  source 1..17: mol_type = other DNA
tagccgcctgctgctgc

SEQ ID NO: 637 - DNA, 25 bp, synthetic construct
  misc_feature 1..25: note = Synthetic: SMAD4 forward primer
  source 1..25: mol_type = other DNA
aggtctttgatttgcgtcagtgtca

SEQ ID NO: 638 - DNA, 18 bp, synthetic construct
  misc_feature 1..18: note = Synthetic: SMAD4 reverse primer
  source 1..18: mol_type = other DNA
gggccagggatgtttcct

SEQ ID NO: 639 - DNA, 27 bp, synthetic construct
  misc_feature 1..27: note = Synthetic: SMAD4 forward primer
  source 1..27: mol_type = other DNA
tatgcatactcaggatgagttttgtga

SEQ ID NO: 640 - DNA, 23 bp, synthetic construct
  misc_feature 1..23: note = Synthetic: SMAD4 reverse primer
  source 1..23: mol_type = other DNA
ccggtgtaagtgaatttcaatcc

SEQ ID NO: 641 - DNA, 24 bp, synthetic construct
  misc_feature 1..24: note = Synthetic: SMAD4 forward primer
  source 1..24: mol_type = other DNA
gagcatcaaagaaacaccttgctg

SEQ ID NO: 642 - DNA, 23 bp, synthetic construct
  misc_feature 1..23: note = Synthetic: SMAD4 reverse primer
  source 1..23: mol_type = other DNA
tctaaaggttgtgggtctgcaat

SEQ ID NO: 643 - DNA, 25 bp, synthetic construct
  misc_feature 1..25: note = Synthetic: SMAD4 forward primer
  source 1..25: mol_type = other DNA
ctcctagacgaagtacttcatacca

SEQ ID NO: 644 - DNA, 22 bp, synthetic construct
  misc_feature 1..22: note = Synthetic: SMAD4 reverse primer
  source 1..22: mol_type = other DNA
tgataaggttaagggccccaac

SEQ ID NO: 645 - DNA, 19 bp, synthetic construct
  misc_feature 1..19: note = Synthetic: SMAD4 forward primer
  source 1..19: mol_type = other DNA
tctggaggtggcctgatct

SEQ ID NO: 646 - DNA, 28 bp, synthetic construct
  misc_feature 1..28: note = Synthetic: SMAD4 reverse primer
  source 1..28: mol_type = other DNA
cactatcacattttaagtcaaacgcata

SEQ ID NO: 647 - DNA, 28 bp, synthetic construct
  misc_feature 1..28: note = Synthetic: SMAD4 forward primer
  source 1..28: mol_type = other DNA
gaactaaaacatgttaaatattgtcagt

SEQ ID NO: 648 - DNA, 28 bp, synthetic construct
  misc_feature 1..28: note = Synthetic: SMAD4 reverse primer
  source 1..28: mol_type = other DNA
gtgatacaactcgttcgtagtgatatgg

SEQ ID NO: 649 - DNA, 27 bp, synthetic construct
  misc_feature 1..27: note = Synthetic: SMAD4 forward primer
  source 1..27: mol_type = other DNA
tgcaagtgaaagccttatatctttctc

SEQ ID NO: 650 - DNA, 24 bp, synthetic construct
  misc_feature 1..24: note = Synthetic: SMAD4 reverse primer
  source 1..24: mol_type = other DNA
agcttgaaggaaccttaaatgtct

SEQ ID NO: 651 - DNA, 28 bp, synthetic construct
  misc_feature 1..28: note = Synthetic: SMAD4 forward primer
  source 1..28: mol_type = other DNA
tgcttactttgaaatggatgttcaggta

SEQ ID NO: 652 - DNA, 21 bp, synthetic construct
  misc_feature 1..21: note = Synthetic: SMAD4 reverse primer
  source 1..21: mol_type = other DNA
cattggagagttgacccaaac

SEQ ID NO: 653 - DNA, 26 bp, synthetic construct
  misc_feature 1..26: note = Synthetic: SMAD4 forward primer
  source 1..26: mol_type = other DNA
cctattgttactgttgatggatacgt

SEQ ID NO: 654 - DNA, 21 bp, synthetic construct
  misc_feature 1..21: note = Synthetic: SMAD4 reverse primer
  source 1..21: mol_type = other DNA
ctctcaatggcttctgtcctg

SEQ ID NO: 655 - DNA, 25 bp, synthetic construct
  misc_feature 1..25: note = Synthetic: SLCO1C1 forward primer
  source 1..25: mol_type = other DNA
gtctcttatcatgaacgagctctct

SEQ ID NO: 656 - DNA, 20 bp, synthetic construct
  misc_feature 1..20: note = Synthetic: SLCO1C1 reverse primer
  source 1..20: mol_type = other DNA
attttcaccgcacatgggtt

SEQ ID NO: 657 - DNA, 26 bp, synthetic construct
  misc_feature 1..26: note = Synthetic: SLCO1C1 forward primer
  source 1..26: mol_type = other DNA
caactcaagatgcaaatgttcagaga

SEQ ID NO: 658 - DNA, 23 bp, synthetic construct
  misc_feature 1..23: note = Synthetic: SLCO1C1 reverse primer
  source 1..23: mol_type = other DNA
aaccagcaagacaagctgataca

SEQ ID NO: 659 - DNA, 28 bp, synthetic construct
  misc_feature 1..28: note = Synthetic: SLC8A1 forward primer
  source 1..28: mol_type = other DNA
actaacagggtcattttcagtcacttca

SEQ ID NO: 660 - DNA, 23 bp, synthetic construct
  misc_feature 1..23: note = Synthetic: SLC8A1 reverse primer
  source 1..23: mol_type = other DNA
aaaaagtagagcattttatcgca

SEQ ID NO: 661 - DNA, 20 bp, synthetic construct
  misc_feature 1..20: note = Synthetic: SLC8A1 forward primer
  source 1..20: mol_type = other DNA
tcatgaggcgagtagcttga

SEQ ID NO: 662 - DNA, 28 bp, synthetic construct
  misc_feature 1..28: note = Synthetic: SLC8A1 reverse primer
  source 1..28: mol_type = other DNA
gaagcatccagataaagaaatagagcaa

SEQ ID NO: 663 - DNA, 17 bp, synthetic construct
  misc_feature 1..17: note = Synthetic: SLC6A18 forward primer
  source 1..17: mol_type = other DNA
gccggcgccagctaatg

SEQ ID NO: 664 - DNA, 17 bp, synthetic construct
  misc_feature 1..17: note = Synthetic: SLC6A18 reverse primer
  source 1..17: mol_type = other DNA
acgggcagcaaggacag

SEQ ID NO: 665 - DNA, 21 bp, synthetic construct
  misc_feature 1..21: note = Synthetic: SLC5A11 forward primer
  source 1..21: mol_type = other DNA
tagcaaccggagtgagaacag

SEQ ID NO: 666 - DNA, 20 bp, synthetic construct
  misc_feature 1..20: note = Synthetic: SLC5A11 reverse primer
  source 1..20: mol_type = other DNA
gatgtcagcggatctcggaa

SEQ ID NO: 667 - DNA, 17 bp, synthetic construct
  misc_feature 1..17: note = Synthetic: SLC5A11 forward primer
  source 1..17: mol_type = other DNA
ccgggaagatgccttcc

SEQ ID NO: 668 - DNA, 25 bp, synthetic construct
  misc_feature 1..25: note = Synthetic: SLC5A11 reverse primer
  source 1..25: mol_type = other DNA
atgggatggacattccaaataggac

SEQ ID NO: 669 - DNA, 18 bp, synthetic construct
  misc_feature 1..18: note = Synthetic: SLC30A2 forward primer
  source 1..18: mol_type = other DNA
ctgctggttggtggtgcc

SEQ ID NO: 670 - DNA, 20 bp, synthetic construct
  misc_feature 1..20: note = Synthetic: SLC30A2 reverse primer
  source 1..20: mol_type = other DNA
tgacccttcaccagtctggc

SEQ ID NO: 671 - DNA, 21 bp, synthetic construct
  misc_feature 1..21: note = Synthetic: SLC30A2 forward primer
  source 1..21: mol_type = other DNA
ccagctctgaccttgaagtat

SEQ ID NO: 672 - DNA, 17 bp, synthetic construct
  misc_feature 1..17: note = Synthetic: SLC30A2 reverse primer
  source 1..17: mol_type = other DNA
aaccccagcgtccgagc

SEQ ID NO: 673 - DNA, 24 bp, synthetic construct
  misc_feature 1..24: note = Synthetic: SLC26A2 forward primer
  source 1..24: mol_type = other DNA
cactcatcactacctggatacatg

SEQ ID NO: 674 - DNA, 21 bp, synthetic construct
  misc_feature 1..21: note = Synthetic: SLC26A2 reverse primer
  source 1..21: mol_type = other DNA
ggcacaaaaggctggtgataa

SEQ ID NO: 675 - DNA, 27 bp, synthetic construct
  misc_feature 1..27: note = Synthetic: SLC26A2 forward primer
  source 1..27: mol_type = other DNA
catccataagaccaatctctgtgatct

SEQ ID NO: 676 - DNA, 24 bp, synthetic construct
  misc_feature 1..24: note = Synthetic: SLC26A2 reverse primer
  source 1..24: mol_type = other DNA
tgccttaagcttggatttgaagtg

SEQ ID NO: 677 - DNA, 23 bp, synthetic construct
  misc_feature 1..23: note = Synthetic: SLC25A38 forward primer
  source 1..23: mol_type = other DNA
cactgtggtaccaagtggataat

SEQ ID NO: 678 - DNA, 23 bp, synthetic construct
  misc_feature 1..23: note = Synthetic: SLC25A38 reverse primer
  source 1..23: mol_type = other DNA
aagaagccacgtagtccatagtc

SEQ ID NO: 679 - DNA, 27 bp, synthetic construct
  misc_feature 1..27: note = Synthetic: SLC25A32 forward primer
  source 1..27: mol_type = other DNA
ccaacggaaattcaaatttttcagtta

SEQ ID NO: 680 - DNA, 24 bp, synthetic construct
  misc_feature 1..24: note = Synthetic: SLC25A32 reverse primer
  source 1..24: mol_type = other DNA
cacaccgacaatataaaggaatgt

SEQ ID NO: 681 - DNA, 22 bp, synthetic construct
  misc_feature 1..22: note = Synthetic: SLC23A2 forward primer
  source 1..22: mol_type = other DNA
gggaccaatcaggaacttgtct

SEQ ID NO: 682 - DNA, 24 bp, synthetic construct
  misc_feature 1..24: note = Synthetic: SLC23A2 reverse primer
  source 1..24: mol_type = other DNA
tattggtgactactacgcctgtgc

SEQ ID NO: 683 - DNA, 20 bp, synthetic construct
  misc_feature 1..20: note = Synthetic: SLC1A3 forward primer
  source 1..20: mol_type = other DNA
agttctgccaccctacccat

SEQ ID NO: 684 - DNA, 22 bp, synthetic construct
  misc_feature 1..22: note = Synthetic: SLC1A3 reverse primer
  source 1..22: mol_type = other DNA
ttaatggtggctcctacgggga

SEQ ID NO: 685 - DNA, 19 bp, synthetic construct
  misc_feature 1..19: note = Synthetic: SLC1A3 forward primer
  source 1..19: mol_type = other DNA
caagcgcgtcaccagattc

SEQ ID NO: 686 - DNA, 21 bp, synthetic construct
  misc_feature 1..21: note = Synthetic: SLC1A3 reverse primer
  source 1..21: mol_type = other DNA
atggcagccaaagcctcatag

SEQ ID NO: 687 - DNA, 22 bp, synthetic construct
  misc_feature 1..22: note = Synthetic: SLC18A2 forward primer
  source 1..22: mol_type = other DNA
tgcctatcatgggctacctcgt

SEQ ID NO: 688 - DNA, 21 bp, synthetic construct
  misc_feature 1..21: note = Synthetic: SLC18A2 reverse primer
  source 1..21: mol_type = other DNA
atgccacatccgcaatggcgt

SEQ ID NO: 689 - DNA, 21 bp, synthetic construct
  misc_feature 1..21: note = Synthetic: SLC18A2 forward primer
  source 1..21: mol_type = other DNA
gtccgtctatgggagtgtgta

SEQ ID NO: 690 - DNA, 26 bp, synthetic construct
  misc_feature 1..26: note = Synthetic: SLC18A2 reverse primer
  source 1..26: mol_type = other DNA
tccttacctatagcataccccataca

SEQ ID NO: 691 - DNA, 22 bp, synthetic construct
  misc_feature 1..22: note = Synthetic: SIX4 forward primer
  source 1..22: mol_type = other DNA
tgcctgtgtatttcccacattt

SEQ ID NO: 692 - DNA, 24 bp, synthetic construct
  misc_feature 1..24: note = Synthetic: SIX4 reverse primer
  source 1..24: mol_type = other DNA
tgcaagtacttcacctgtcttcct

SEQ ID NO: 693 - DNA, 18 bp, synthetic construct
  misc_feature 1..18: note = Synthetic: SIGLEC9 forward primer
  source 1..18: mol_type = other DNA
gggaaggggccaatacag

SEQ ID NO: 694 - DNA, 19 bp, synthetic construct
  misc_feature 1..19: note = Synthetic: SIGLEC9 reverse primer
  source 1..19: mol_type = other DNA
caaggaggtggaatcggtc

SEQ ID NO: 695 - DNA, 19 bp, synthetic construct
  misc_feature 1..19: note = Synthetic: SIGLEC9 forward primer
  source 1..19: mol_type = other DNA
ccacaaacaacccagctcg

SEQ ID NO: 696 - DNA, 21 bp, synthetic construct
  misc_feature 1..21: note = Synthetic: SIGLEC9 reverse primer
  source 1..21: mol_type = other DNA
ctgatgctcagggtgcaattc

SEQ ID NO: 697 - DNA, 21 bp, synthetic construct
  misc_feature 1..21: note = Synthetic: SIGLEC7 forward primer
  source 1..21: mol_type = other DNA
gtctggctgcttccagaatct

SEQ ID NO: 698 - DNA, 19 bp, synthetic construct
  misc_feature 1..19: note = Synthetic: SIGLEC7 reverse primer
  source 1..19: mol_type = other DNA
acagaggtccccatccagg

SEQ ID NO: 699 - DNA, 19 bp, synthetic construct
  misc_feature 1..19: note = Synthetic: SIGLEC7 forward primer
  source 1..19: mol_type = other DNA
gacgccccctatgatctcc

SEQ ID NO: 700 - DNA, 18 bp, synthetic construct
  misc_feature 1..18: note = Synthetic: SIGLEC7 reverse primer
  source 1..18: mol_type = other DNA
aggcaaggtcacctgaca

SEQ ID NO: 701 - DNA, 20 bp, synthetic construct
  misc_feature 1..20: note = Synthetic: SIGLEC6 forward primer
  source 1..20: mol_type = other DNA
ggaccccggtattggagatg

SEQ ID NO: 702 - DNA, 19 bp, synthetic construct
  misc_feature 1..19: note = Synthetic: SIGLEC6 reverse primer
  source 1..19: mol_type = other DNA
tgcacacctgagctggttc

SEQ ID NO: 703 - DNA, 17 bp, synthetic construct
  misc_feature 1..17: note = Synthetic: SIGLEC6 forward primer
  source 1..17: mol_type = other DNA
ttcagggcggggaagcc

SEQ ID NO: 704 - DNA, 18 bp, synthetic construct
  misc_feature 1..18: note = Synthetic: SIGLEC6 reverse primer
  source 1..18: mol_type = other DNA
gcggctgctctgtgatgc

SEQ ID NO: 705 - DNA, 24 bp, synthetic construct
  misc_feature 1..24: note = Synthetic: SI forward primer
  source 1..24: mol_type = other DNA
ttgttgtcatgtcttgaacgttat

SEQ ID NO: 706 - DNA, 34 bp, synthetic construct
  misc_feature 1..34: note = Synthetic: SI reverse primer
  source 1..34: mol_type = other DNA
ctttaaaaatattttatcagggaatttgtgcaca

SEQ ID NO: 707 - DNA, 18 bp, synthetic construct
  misc_feature 1..18: note = Synthetic: SI forward primer
  source 1..18: mol_type = other DNA
tcattccacggcctccag

SEQ ID NO: 708 - DNA, 27 bp, synthetic construct
  misc_feature 1..27: note = Synthetic: SI reverse primer
  source 1..27: mol_type = other DNA
cagagactgggacatctgataatagta

SEQ ID NO: 709 - DNA, 24 bp, synthetic construct
  misc_feature 1..24: note = Synthetic: SI forward primer
  source 1..24: mol_type = other DNA
cagttcagatctcgcttaaatgct

SEQ ID NO: 710 - DNA, 25 bp, synthetic construct
  misc_feature 1..25: note = Synthetic: SI reverse primer
  source 1..25: mol_type = other DNA
ctgcctggatttgcttttaatgacc

SEQ ID NO: 711 - DNA, 27 bp, synthetic construct
  misc_feature 1..27: note = Synthetic: SGK1 forward primer
  source 1..27: mol_type = other DNA
gtcaaacttactgtttgcatgcatagg

SEQ ID NO: 712 - DNA, 28 bp, synthetic construct
  misc_feature 1..28: note = Synthetic: SGK1 reverse primer
  source 1..28: mol_type = other DNA
tttctttatttctcctccttcatccaca

SEQ ID NO: 713 - DNA, 20 bp, synthetic construct
  misc_feature 1..20: note = Synthetic: SGK1 forward primer
  source 1..20: mol_type = other DNA
cccatcctcctctgcttcat

SEQ ID NO: 714 - DNA, 23 bp, synthetic construct
  misc_feature 1..23: note = Synthetic: SGK1 reverse primer
  source 1..23: mol_type = other DNA
ggacgttatgaagccgtctaaac

SEQ ID NO: 715 - DNA, 21 bp, synthetic construct
  misc_feature 1..21: note = Synthetic: SFMBT2 forward primer
  source 1..21: mol_type = other DNA
caaatccgcgatgactacgtc

SEQ ID NO: 716 - DNA, 19 bp, synthetic construct
  misc_feature 1..19: note = Synthetic: SFMBT2 reverse primer
  source 1..19: mol_type = other DNA
ctgcttctgcgctactgcg

SEQ ID NO: 717 - DNA, 17 bp, synthetic construct
  misc_feature 1..17: note = Synthetic: SFMBT2 forward primer
  source 1..17: mol_type = other DNA
gcggtcctccccgtaac

SEQ ID NO: 718 - DNA, 20 bp, synthetic construct
  misc_feature 1..20: note = Synthetic: SFMBT2 reverse primer
  source 1..20: mol_type = other DNA
gggtggccacgatcattacc

SEQ ID NO: 719 - DNA, 22 bp, synthetic construct
  misc_feature 1..22: note = Synthetic: SF3B1 forward primer
  source 1..22: mol_type = other DNA
ggctacaacagcaaaagctcta

SEQ ID NO: 720 - DNA, 26 bp, synthetic construct
  misc_feature 1..26: note = Synthetic: SF3B1 reverse primer
  source 1..26: mol_type = other DNA
gtctggctactatgatctctaccatg

SEQ ID NO: 721 - DNA, 19 bp, synthetic construct
  misc_feature 1..19: note = Synthetic: SF3B1 forward primer
  source 1..19: mol_type = other DNA
caaggcagcaatggccaaa

SEQ ID NO: 722 - DNA, 25 bp, synthetic construct
  misc_feature 1..25: note = Synthetic: SF3B1 reverse primer
  source 1..25: mol_type = other DNA
gggcatagttaaaacctgtgtttgg

SEQ ID NO: 723 - DNA, 23 bp, synthetic construct
  misc_feature 1..23: note = Synthetic: SETD2 forward primer
  source 1..23: mol_type = other DNA
ttctgcatctgttgctgttgttt

SEQ ID NO: 724 - DNA, 26 bp, synthetic construct
  misc_feature 1..26: note = Synthetic: SETD2 reverse primer
  source 1..26: mol_type = other DNA
gaccgcaataaactttctacagagga

SEQ ID NO: 725 - DNA, 22 bp, synthetic construct
  misc_feature 1..22: note = Synthetic: SETD2 forward primer
  source 1..22: mol_type = other DNA
ccacctcttgctcaaacaactt

SEQ ID NO: 726 - DNA, 27 bp, synthetic construct
  misc_feature 1..27: note = Synthetic: SETD2 reverse primer
  source 1..27: mol_type = other DNA
gagcaactttttgtggtccttattttc

SEQ ID NO: 727 - DNA, 19 bp, synthetic construct
  misc_feature 1..19: note = Synthetic: SERPINA5 forward primer
  source 1..19: mol_type = other DNA
agcagaagggactttacct

SEQ ID NO: 728 - DNA, 22 bp, synthetic construct
  misc_feature 1..22: note = Synthetic: SERPINA5 reverse primer
  source 1..22: mol_type = other DNA
tgctcacaggggagaagaagat

SEQ ID NO: 729 - DNA, 17 bp, synthetic construct
  misc_feature 1..17: note = Synthetic: SERPINA5 forward primer
  source 1..17: mol_type = other DNA
ctgcccccagccagagc

SEQ ID NO: 730 - DNA, 23 bp, synthetic construct
  misc_feature 1..23: note = Synthetic: SERPINA5 reverse primer
  source 1..23: mol_type = other DNA
tccaggatctgcatctttgtgct

SEQ ID NO: 731 - DNA, 20 bp, synthetic construct
  misc_feature 1..20: note = Synthetic: SEMA5A forward primer
  source 1..20: mol_type = other DNA
tcagtccccacggaatcact

SEQ ID NO: 732 - DNA, 23 bp, synthetic construct
  misc_feature 1..23: note = Synthetic: SEMA5A reverse primer
  source 1..23: mol_type = other DNA
aatttgctggaagtgggaagaca

SEQ ID NO: 733 - DNA, 22 bp, synthetic construct
  misc_feature 1..22: note = Synthetic: SEMA5A forward primer
  source 1..22: mol_type = other DNA
tagaacagtaccgcatttcgat

SEQ ID NO: 734 - DNA, 25 bp, synthetic construct
  misc_feature 1..25: note = Synthetic: SEMA5A reverse primer
  source 1..25: mol_type = other DNA
ctatgagcaacgattccgatacaca

SEQ ID NO: 735 - DNA, 23 bp, synthetic construct
  misc_feature 1..23: note = Synthetic: SEMA5A forward primer
  source 1..23: mol_type = other DNA
cccacagtcatgctctactgcat

SEQ ID NO: 736 - DNA, 27 bp, synthetic construct
  misc_feature 1..27: note = Synthetic: SEMA5A reverse primer
  source 1..27: mol_type = other DNA
cttttctattgtttccagagccaaact

SEQ ID NO: 737 - DNA, 31 bp, synthetic construct
  misc_feature 1..31: note = Synthetic: SEMA5A forward primer
  source 1..31: mol_type = other DNA
aggtaaaatttccgatgtcataagatgacac

SEQ ID NO: 738 - DNA, 26 bp, synthetic construct
  misc_feature 1..26: note = Synthetic: SEMA5A reverse primer
  source 1..26: mol_type = other DNA
accaaaagggaatgacatgaatgttg

SEQ ID NO: 739 - DNA, 34 bp, synthetic construct
  misc_feature 1..34: note = Synthetic: SEC31A forward primer
  source 1..34: mol_type = other DNA
atataaaggaacagttaaatttgcagataatgaa

SEQ ID NO: 740 - DNA, 32 bp, synthetic construct
  misc_feature 1..32: note = Synthetic: SEC31A reverse primer
  source 1..32: mol_type = other DNA
tcacaaggatttatcaattattgccaaaaaaa

SEQ ID NO: 741 - DNA, 21 bp, synthetic construct
  misc_feature 1..21: note = Synthetic: SCN9A forward primer
  source 1..21: mol_type = other DNA
acactgtgctgcctgagattt

SEQ ID NO: 742 - DNA, 21 bp, synthetic construct
  misc_feature 1..21: note = Synthetic: SCN9A reverse primer
  source 1..21: mol_type = other DNA
ttttcttcgtgacccgtggaa

SEQ ID NO: 743 - DNA, 23 bp, synthetic construct
  misc_feature 1..23: note = Synthetic: SCN9A forward primer
  source 1..23: mol_type = other DNA
atgacgacaaaatccagccagtt

SEQ ID NO: 744 - DNA, 22 bp, synthetic construct
  misc_feature 1..22: note = Synthetic: SCN9A reverse primer
  source 1..22: mol_type = other DNA
tgcaagaggcttctgtgtagga

SEQ ID NO: 745 - DNA, 34 bp, synthetic construct
  misc_feature 1..34: note = Synthetic: SCN7A forward primer
  source 1..34: mol_type = other DNA
gagcaaaacattaaaatagactcaatttaaagaa

SEQ ID NO: 746 - DNA, 19 bp, synthetic construct
  misc_feature 1..19: note = Synthetic: SCN7A reverse primer
  source 1..19: mol_type = other DNA
gtgtctgggcaggatcatt

SEQ ID NO: 747 - DNA, 21 bp, synthetic construct
  misc_feature 1..21: note = Synthetic: SCN7A forward primer
  source 1..21: mol_type = other DNA
ttccatggatcaccgaggaag

SEQ ID NO: 748 - DNA, 24 bp, synthetic construct
  misc_feature 1..24: note = Synthetic: SCN7A reverse primer
  source 1..24: mol_type = other DNA
ctgcaggaatactttgcttggaat

SEQ ID NO: 749 - DNA, 28 bp, synthetic construct
  misc_feature 1..28: note = Synthetic: SCN7A forward primer
  source 1..28: mol_type = other DNA
tatacatggcaaggtgattcttacctcg

SEQ ID NO: 750 - DNA, 27 bp, synthetic construct
  misc_feature 1..27: note = Synthetic: SCN7A reverse primer
  source 1..27: mol_type = other DNA
gcaacttgaaacataaatgttttcgat

SEQ ID NO: 751 - DNA, 24 bp, synthetic construct
  misc_feature 1..24: note = Synthetic: SCN7A forward primer
  source 1..24: mol_type = other DNA
gttgtgcagggtttcattttcatt

SEQ ID NO: 752 - DNA, 22 bp, synthetic construct
  misc_feature 1..22: note = Synthetic: SCN7A reverse primer
  source 1..22: mol_type = other DNA
aattgggatggggctcttcatg

SEQ ID NO: 753 - DNA, 20 bp, synthetic construct
  misc_feature 1..20: note = Synthetic: SCN5A forward primer
  source 1..20: mol_type = other DNA
cacgatgtggtagcaggtct

SEQ ID NO: 754 - DNA, 19 bp, synthetic construct
  misc_feature 1..19: note = Synthetic: SCN5A reverse primer
  source 1..19: mol_type = other DNA
tctcccataggctgtgtcc

SEQ ID NO: 755 - DNA, 19 bp, synthetic construct
  misc_feature 1..19: note = Synthetic: SCN5A forward primer
  source 1..19: mol_type = other DNA
cgctccactgctgagtagg

SEQ ID NO: 756 - DNA, 19 bp, synthetic construct
  misc_feature 1..19: note = Synthetic: SCN5A reverse primer
  source 1..19: mol_type = other DNA
gcacagctggttcgagaca

SEQ ID NO: 757 - DNA, 26 bp, synthetic construct
  misc_feature 1..26: note = Synthetic: SCN4A forward primer
  source 1..26: mol_type = other DNA
cctcaatctccatctgcttattccgc

SEQ ID NO: 758 - DNA, 21 bp, synthetic construct
  misc_feature 1..21: note = Synthetic: SCN4A reverse primer
  source 1..21: mol_type = other DNA
cactggcagccatagaacagc

SEQ ID NO: 759 - DNA, 19 bp, synthetic construct
  misc_feature 1..19: note = Synthetic: SCN4A forward primer
  source 1..19: mol_type = other DNA
ccatgcagtcccacatggt

SEQ ID NO: 760 - DNA, 19 bp, synthetic construct
  misc_feature 1..19: note = Synthetic: SCN4A reverse primer
  source 1..19: mol_type = other DNA
ctggcacatgcatgatttc

SEQ ID NO: 761 - DNA, 22 bp, synthetic construct
  misc_feature 1..22: note = Synthetic: SCN4A forward primer
  source 1..22: mol_type = other DNA
cgatgaggaaggagtggaagaa

SEQ ID NO: 762 - DNA, 20 bp, synthetic construct
  misc_feature 1..20: note = Synthetic: SCN4A reverse primer
  source 1..20: mol_type = other DNA
gtgtgcaagattgccttgga

SEQ ID NO: 763 - DNA, 19 bp, synthetic construct
  misc_feature 1..19: note = Synthetic: SCN3B forward primer
  source 1..19: mol_type = other DNA
agagcaggacgccctagag

SEQ ID NO: 764 - DNA, 21 bp, synthetic construct
  misc_feature 1..21: note = Synthetic: SCN3B reverse primer
  source 1..21: mol_type = other DNA
gtcccgggagtttgagtttga

SEQ ID NO: 765 - DNA, 20 bp, synthetic construct
  misc_feature 1..20: note = Synthetic: SCN3B forward primer
  source 1..20: mol_type = other DNA
cttcacaaagggccgatgcg

SEQ ID NO: 766 - DNA, 22 bp, synthetic construct
  misc_feature 1..22: note = Synthetic: SCN3B reverse primer
  source 1..22: mol_type = other DNA
tcactgtgctcaacgtcactct

SEQ ID NO: 767 - DNA, 23 bp, synthetic construct
  misc_feature 1..23: note = Synthetic: RYR2 forward primer
  source 1..23: mol_type = other DNA
gtcatttccaagagggacttcca

SEQ ID NO: 768 - DNA, 24 bp, synthetic construct
  misc_feature 1..24: note = Synthetic: RYR2 reverse primer
  source 1..24: mol_type = other DNA
cacaagacaaaagaaattccgttt

SEQ ID NO: 769 - DNA, 23 bp, synthetic construct
  misc_feature 1..23: note = Synthetic: RYR2 forward primer
  source 1..23: mol_type = other DNA
gagagccataagcactacacgca

SEQ ID NO: 770 - DNA, 23 bp, synthetic construct
  misc_feature 1..23: note = Synthetic: RYR2 reverse primer
  source 1..23: mol_type = other DNA
ttcgtagtcgagggtttcattct

SEQ ID NO: 771 - DNA, 23 bp, synthetic construct
  misc_feature 1..23: note = Synthetic: RYR2 forward primer
  source 1..23: mol_type = other DNA
ccgacttcagacttttctggaat

SEQ ID NO: 772 - DNA, 21 bp, synthetic construct
  misc_feature 1..21: note = Synthetic: RYR2 reverse primer
  source 1..21: mol_type = other DNA
cttcccatgatttcgatgcgg

SEQ ID NO: 773 - DNA, 24 bp, synthetic construct
  misc_feature 1..24: note = Synthetic: RYR2 forward primer
  source 1..24: mol_type = other DNA
tcctgaattatttccagccctttc

SEQ ID NO: 774 - DNA, 22 bp, synthetic construct
  misc_feature 1..22: note = Synthetic: RYR2 reverse primer
  source 1..22: mol_type = other DNA
cggctggactcactgatttcaa

SEQ ID NO: 775 - DNA, 23 bp, synthetic construct
  misc_feature 1..23: note = Synthetic: RYR2 forward primer
  source 1..23: mol_type = other DNA
tcaaggagtccaaaagacagttc

SEQ ID NO: 776 - DNA, 20 bp, synthetic construct
  misc_feature 1..20: note = Synthetic: RYR2 reverse primer
  source 1..20: mol_type = other DNA
tgtcctcgcagaagttcaca

SEQ ID NO: 777 - DNA, 22 bp, synthetic construct
  misc_feature 1..22: note = Synthetic: RYR2 forward primer
  source 1..22: mol_type = other DNA
agaaagagaagatggaactctt

SEQ ID NO: 778 - DNA, 20 bp, synthetic construct
  misc_feature 1..20: note = Synthetic: RYR2 reverse primer
  source 1..20: mol_type = other DNA
ccagctgcatttcaaagatg

SEQ ID NO: 779 - DNA, 29 bp, synthetic construct
  misc_feature 1..29: note = Synthetic: RYR2 forward primer
  source 1..29: mol_type = other DNA
tcttttcatcctactggagtattttcatg

SEQ ID NO: 780 - DNA, 25 bp, synthetic construct
  misc_feature 1..25: note = Synthetic: RYR2 reverse primer
  source 1..25: mol_type = other DNA
tctttttagcaccttcgacgaggct

SEQ ID NO: 781 - DNA, 19 bp, synthetic construct
  misc_feature 1..19: note = Synthetic: RYR2 forward primer
  source 1..19: mol_type = other DNA
tcatttgcagcctgctgct

SEQ ID NO: 782 - DNA, 22 bp, synthetic construct
  misc_feature 1..22: note = Synthetic: RYR2 reverse primer
  source 1..22: mol_type = other DNA
gcatgttggctaacagttctgc

SEQ ID NO: 783 - DNA, 22 bp, synthetic construct
  misc_feature 1..22: note = Synthetic: RYR2 forward primer
  source 1..22: mol_type = other DNA
ttccacagtcgatttgcctata

SEQ ID NO: 784 - DNA, 26 bp, synthetic construct
  misc_feature 1..26: note = Synthetic: RYR2 reverse primer
  source 1..26: mol_type = other DNA
cttcatgctctaaatgctcatctggg

SEQ ID NO: 785 - DNA, 27 bp, synthetic construct
  misc_feature 1..27: note = Synthetic: RYR2 forward primer
  source 1..27: mol_type = other DNA
gccaacaaaatgctttttctcataccc

SEQ ID NO: 786 - DNA, 23 bp, synthetic construct
  misc_feature 1..23: note = Synthetic: RYR2 reverse primer
  source 1..23: mol_type = other DNA
ccttgtccatgccaagtaattca

SEQ ID NO: 787 - DNA, 21 bp, synthetic construct
  misc_feature 1..21: note = Synthetic: RYR2 forward primer
  source 1..21: mol_type = other DNA
tctacggccgagacagaatca

SEQ ID NO: 788 - DNA, 25 bp, synthetic construct
  misc_feature 1..25: note = Synthetic: RYR2 reverse primer
  source 1..25: mol_type = other DNA
ttttctctggcatcactgaagtcca

SEQ ID NO: 789 - DNA, 26 bp, synthetic construct
  misc_feature 1..26: note = Synthetic: RYR2 forward primer
  source 1..26: mol_type = other DNA
gtattaaccgttggcttattagctgt

SEQ ID NO: 790 - DNA, 27 bp, synthetic construct
  misc_feature 1..27: note = Synthetic: RYR2 reverse primer
  source 1..27: mol_type = other DNA
acatttcatatctggtgtatcaccatc

SEQ ID NO: 791 - DNA, 24 bp, synthetic construct
  misc_feature 1..24: note = Synthetic: RYR2 forward primer
  source 1..24: mol_type = other DNA
ttccgaaaattctacaataaaagt

SEQ ID NO: 792 - DNA, 33 bp, synthetic construct
  misc_feature 1..33: note = Synthetic: RYR2 reverse primer
  source 1..33: mol_type = other DNA
gatcaaaggttatgaacttactgttagcatatc

SEQ ID NO: 793 - DNA, 30 bp, synthetic construct
  misc_feature 1..30: note = Synthetic: RYR2 forward primer
  source 1..30: mol_type = other DNA
aggagatgaatatgagatctatcgaatcat

SEQ ID NO: 794 - DNA, 24 bp, synthetic construct
  misc_feature 1..24: note = Synthetic: RYR2 reverse primer
  source 1..24: mol_type = other DNA
tcagcttcagtgaggaggatactt

SEQ ID NO: 795 - DNA, 27 bp, synthetic construct
  misc_feature 1..27: note = Synthetic: RYR2 forward primer
  source 1..27: mol_type = other DNA
ccttgacttttgcaggaatcttatgtc

SEQ ID NO: 796 - DNA, 22 bp, synthetic construct
  misc_feature 1..22: note = Synthetic: RYR2 reverse primer
  source 1..22: mol_type = other DNA
actgtttccggaagcaatcccc

SEQ ID NO: 797 - DNA, 28 bp, synthetic construct
  misc_feature 1..28: note = Synthetic: RYR2 forward primer
  source 1..28: mol_type = other DNA
tgtatcaagaaaggtgttgggaattttt

SEQ ID NO: 798 - DNA, 27 bp, synthetic construct
  misc_feature 1..27: note = Synthetic: RYR2 reverse primer
  source 1..27: mol_type = other DNA
tctgagtttaatttagctggtcttcat

SEQ ID NO: 799 - DNA, 21 bp, synthetic construct
  misc_feature 1..21: note = Synthetic: RYR2 forward primer
  source 1..21: mol_type = other DNA
tcgtgcttgagtgcatagacc

SEQ ID NO: 800 - DNA, 26 bp, synthetic construct
  misc_feature 1..26: note = Synthetic: RYR2 reverse primer
  source 1..26: mol_type = other DNA
atgaacccaatcatgcttcttaccca

SEQ ID NO: 801 - DNA, 28 bp, synthetic construct
  misc_feature 1..28: note = Synthetic: RYR2 forward primer
  source 1..28: mol_type = other DNA
gtcttggaaatccattctgaattctctg

SEQ ID NO: 802 - DNA, 25 bp, synthetic construct
  misc_feature 1..25: note = Synthetic: RYR2 reverse primer
  source 1..25: mol_type = other DNA
ccatcacacctagtccatttatgga

SEQ ID NO: 803 - DNA, 22 bp, synthetic construct
  misc_feature 1..22: note = Synthetic: RYR2 forward primer
  source 1..22: mol_type = other DNA
cttcttttgcagcggctctaat

SEQ ID NO: 804 - DNA, 23 bp, synthetic construct
  misc_feature 1..23: note = Synthetic: RYR2 reverse primer
  source 1..23: mol_type = other DNA
tctgctgatcaaccagtcgaggg

SEQ ID NO: 805 - DNA, 25 bp, synthetic construct
  misc_feature 1..25: note = Synthetic: RYR2 forward primer
  source 1..25: mol_type = other DNA
ctgttctgccaaaagaaaagttgaa

SEQ ID NO: 806 - DNA, 18 bp, synthetic construct
  misc_feature 1..18: note = Synthetic: RYR2 reverse primer
  source 1..18: mol_type = other DNA
gtgaaggcagcttgcgtc

SEQ ID NO: 807 - DNA, 17 bp, synthetic construct
  misc_feature 1..17: note = Synthetic: RYR2 forward primer
  source 1..17: mol_type = other DNA
tgggccccacagtttcc

SEQ ID NO: 808 - DNA, 23 bp, synthetic construct
  misc_feature 1..23: note = Synthetic: RYR2 reverse primer
  source 1..23: mol_type = other DNA
cttggtacctggctggtatccac

SEQ ID NO: 809 - DNA, 23 bp, synthetic construct
  misc_feature 1..23: note = Synthetic: RYR2 forward primer
  source 1..23: mol_type = other DNA
tcgtgttgcctcctcatctagaa

SEQ ID NO: 810 - DNA, 22 bp, synthetic construct
  misc_feature 1..22: note = Synthetic: RYR2 reverse primer
  source 1..22: mol_type = other DNA
ctgccagccaagctcaatttta

SEQ ID NO: 811 - DNA, 28 bp, synthetic construct
  misc_feature 1..28: note = Synthetic: RYR2 forward primer
  source 1..28: mol_type = other DNA
aatatccatgaactctgggttatgaata

SEQ ID NO: 812 - DNA, 26 bp, synthetic construct
  misc_feature 1..26: note = Synthetic: RYR2 reverse primer
  source 1..26: mol_type = other DNA
gaaaaggcagaaaaagttatgttttc

SEQ ID NO: 813 - DNA, 20 bp, synthetic construct
  misc_feature 1..20: note = Synthetic: RYR2 forward primer
  source 1..20: mol_type = other DNA
cactgctggagacatgaggg

SEQ ID NO: 814 - DNA, 21 bp, synthetic construct
  misc_feature 1..21: note = Synthetic: RYR2 reverse primer
  source 1..21: mol_type = other DNA
aggcaaaggcacgttcatctg

SEQ ID NO: 815 - DNA, 19 bp, synthetic construct
  misc_feature 1..19: note = Synthetic: RYR2 forward primer
  source 1..19: mol_type = other DNA
tcctggttgtcaaccggat

SEQ ID NO: 816 - DNA, 19 bp, synthetic construct
  misc_feature 1..19: note = Synthetic: RYR2 reverse primer
  source 1..19: mol_type = other DNA
cctccagcacgtacagatg

SEQ ID NO: 817 - DNA, 25 bp, synthetic construct
  misc_feature 1..25: note = Synthetic: RYR2 forward primer
  source 1..25: mol_type = other DNA
gacttttctgtcctctgtataggcc

SEQ ID NO: 818 - DNA, 21 bp, synthetic construct
  misc_feature 1..21: note = Synthetic: RYR2 reverse primer
  source 1..21: mol_type = other DNA
ccatacaccccacgacatcgc

SEQ ID NO: 819 - DNA, 19 bp, synthetic construct
  misc_feature 1..19: note = Synthetic: RYR2 forward primer
  source 1..19: mol_type = other DNA
tgggcgctcttggcaagca

SEQ ID NO: 820 - DNA, 21 bp, synthetic construct
  misc_feature 1..21: note = Synthetic: RYR2 reverse primer
  source 1..21: mol_type = other DNA
aagccagttctgagcctgaat

SEQ ID NO: 821 - DNA, 25 bp, synthetic construct
  misc_feature 1..25: note = Synthetic: RYR2 forward primer
  source 1..25: mol_type = other DNA
tccccatgtttaaaggtcactcaga

SEQ ID NO: 822 - DNA, 19 bp, synthetic construct
  misc_feature 1..19: note = Synthetic: RYR2 reverse primer
  source 1..19: mol_type = other DNA
tcgatcggcatgctcaggc

SEQ ID NO: 823 - DNA, 26 bp, synthetic construct
  misc_feature 1..26: note = Synthetic: RYR2 forward primer
  source 1..26: mol_type = other DNA
agaacagcaacactgatatcatgttt

SEQ ID NO: 824 - DNA, 23 bp, synthetic construct
  misc_feature 1..23: note = Synthetic: RYR2 reverse primer
  source 1..23: mol_type = other DNA
gtcattcttgggcccaaaaaggc

SEQ ID NO: 825 - DNA, 18 bp, synthetic construct
  misc_feature 1..18: note = Synthetic: RYR2 forward primer
  source 1..18: mol_type = other DNA
ccgctagaatgtgatgcc

SEQ ID NO: 826 - DNA, 19 bp, synthetic construct
  misc_feature 1..19: note = Synthetic: RYR2 reverse primer
  source 1..19: mol_type = other DNA
ccacaggacgtgtgacagg

SEQ ID NO: 827 - DNA, 27 bp, synthetic construct
  misc_feature 1..27: note = Synthetic: RYR2 forward primer
  source 1..27: mol_type = other DNA
ttttcagatgattttgtggctaagctc

SEQ ID NO: 828 - DNA, 20 bp, synthetic construct
  misc_feature 1..20: note = Synthetic: RYR2 reverse primer
  source 1..20: mol_type = other DNA
gtgagtgcagctgacatgtt

SEQ ID NO: 829 - DNA, 23 bp, synthetic construct
  misc_feature 1..23: note = Synthetic: RYR2 forward primer
  source 1..23: mol_type = other DNA
cgatacaacgaagtcatgcaagc

SEQ ID NO: 830 - DNA, 22 bp, synthetic construct
  misc_feature 1..22: note = Synthetic: RYR2 reverse primer
  source 1..22: mol_type = other DNA
ctgttcttgaggtggtgatcta

SEQ ID NO: 831 - DNA, 32 bp, synthetic construct
  misc_feature 1..32: note = Synthetic: RYR2 forward primer
  source 1..32: mol_type = other DNA
tcagatttcctagacagaattgtaacattgat

SEQ ID NO: 832 - DNA, 22 bp, synthetic construct
  misc_feature 1..22: note = Synthetic: RYR2 reverse primer
  source 1..22: mol_type = other DNA
ggggaatgagggatctcaaaat

SEQ ID NO: 833 - DNA, 22 bp, synthetic construct
  misc_feature 1..22: note = Synthetic: RYR2 forward primer
  source 1..22: mol_type = other DNA
aagggagaagccatcagaatta

SEQ ID NO: 834 - DNA, 23 bp, synthetic construct
  misc_feature 1..23: note = Synthetic: RYR2 reverse primer
  source 1..23: mol_type = other DNA
gaaaagcgatgctgataacgccc

SEQ ID NO: 835 - DNA, 28 bp, synthetic construct
  misc_feature 1..28: note = Synthetic: RYR2 forward primer
  source 1..28: mol_type = other DNA
ttaactcacatttgggcttttgtttgtt

SEQ ID NO: 836 - DNA, 25 bp, synthetic construct
  misc_feature 1..25: note = Synthetic: RYR2 reverse primer
  source 1..25: mol_type = other DNA
ttctacttacgcaactcttagcgtc

SEQ ID NO: 837 - DNA, 22 bp, synthetic construct
  misc_feature 1..22: note = Synthetic: RYR2 forward primer
  source 1..22: mol_type = other DNA
ttcatgcacgttccctttggag

SEQ ID NO: 838 - DNA, 22 bp, synthetic construct
  misc_feature 1..22: note = Synthetic: RYR2 reverse primer
  source 1..22: mol_type = other DNA
acacttggtgcattaggctgtg

SEQ ID NO: 839 - DNA, 25 bp, synthetic construct
  misc_feature 1..25: note = Synthetic: RYR2 forward primer
  source 1..25: mol_type = other DNA
aagagaaagccaaggatagagaaaa

SEQ ID NO: 840 - DNA, 27 bp, synthetic construct
  misc_feature 1..27: note = Synthetic: RYR2 reverse primer
  source 1..27: mol_type = other DNA
tatgtgtacttttacctggatacagca

SEQ ID NO: 841 - DNA, 25 bp, synthetic construct
  misc_feature 1..25: note = Synthetic: RYR2 forward primer
  source 1..25: mol_type = other DNA
atcctcaagttcttgcagatcaatg

SEQ ID NO: 842 - DNA, 34 bp, synthetic construct
  misc_feature 1..34: note = Synthetic: RYR2 reverse primer
  source 1..34: mol_type = other DNA
agatatttaaatattcactcttgtgaaaagagtg

SEQ ID NO: 843 - DNA, 18 bp, synthetic construct
  misc_feature 1..18: note = Synthetic: RYR1 forward primer
  source 1..18: mol_type = other DNA
tgtttcgtggccgctctg

SEQ ID NO: 844 - DNA, 17 bp, synthetic construct
  misc_feature 1..17: note = Synthetic: RYR1 reverse primer
  source 1..17: mol_type = other DNA
gggtcgcgagcgtgctg

SEQ ID NO: 845 - DNA, 17 bp, synthetic construct
  misc_feature 1..17: note = Synthetic: RYR1 forward primer
  source 1..17: mol_type = other DNA
gcggtgcgcgacggtgg

SEQ ID NO: 846 - DNA, 21 bp, synthetic construct
  misc_feature 1..21: note = Synthetic: RYR1 reverse primer
  source 1..21: mol_type = other DNA
acaggcacaaactggaactcc

SEQ ID NO: 847 - DNA, 22 bp, synthetic construct
  misc_feature 1..22: note = Synthetic: RUNX2 forward primer
  source 1..22: mol_type = other DNA
gtggctgttgtgatgcgtattc

SEQ ID NO: 848 - DNA, 20 bp, synthetic construct
  misc_feature 1..20: note = Synthetic: RUNX2 reverse primer
  source 1..20: mol_type = other DNA
tcacgtcgctcattttgccg

SEQ ID NO: 849 - DNA, 18 bp, synthetic construct
  misc_feature 1..18: note = Synthetic: RUNX1 forward primer
  source 1..18: mol_type = other DNA
gggtgtaccagcctggag

SEQ ID NO: 850 - DNA, 18 bp, synthetic construct
  misc_feature 1..18: note = Synthetic: RUNX1 reverse primer
  source 1..18: mol_type = other DNA
caagtcgccacctaccac

SEQ ID NO: 851 - DNA, 21 bp, synthetic construct
  misc_feature 1..21: note = Synthetic: RUNX1 forward primer
  source 1..21: mol_type = other DNA
gcccatccactgtgattttga

SEQ ID NO: 852 - DNA, 24 bp, synthetic construct
  misc_feature 1..24: note = Synthetic: RUNX1 reverse primer
  source 1..24: mol_type = other DNA
aaagcttcactctgaccatcactg

SEQ ID NO: 853 - DNA, 21 bp, synthetic construct
  misc_feature 1..21: note = Synthetic: RSPO2 forward primer
  source 1..21: mol_type = other DNA
aatgcaggcactctccatact

SEQ ID NO: 854 - DNA, 24 bp, synthetic construct
  misc_feature 1..24: note = Synthetic: RSPO2 reverse primer
  source 1..24: mol_type = other DNA
ttgttcaaaggacaatgggtgtag

SEQ ID NO: 855 - DNA, 26 bp, synthetic construct
  misc_feature 1..26: note = Synthetic: RSPO2 forward primer
  source 1..26: mol_type = other DNA
aagaacaacttctgttgacatcggct

SEQ ID NO: 856 - DNA, 24 bp, synthetic construct
  misc_feature 1..24: note = Synthetic: RSPO2 reverse primer
  source 1..24: mol_type = other DNA
atcccatttgcaagggttgtttgt

SEQ ID NO: 857 - DNA, 26 bp, synthetic construct
  misc_feature 1..26: note = Synthetic: RPL22 forward primer
  source 1..26: mol_type = other DNA
gagtggcaataaggatgtaacttaca

SEQ ID NO: 858 - DNA, 25 bp, synthetic construct
  misc_feature 1..25: note = Synthetic: RPL22 reverse primer
  source 1..25: mol_type = other DNA
ttagaaaaagcttgtggtgaagggg

SEQ ID NO: 859 - DNA, 26 bp, synthetic construct
  misc_feature 1..26: note = Synthetic: RPL22 forward primer
  source 1..26: mol_type = other DNA
caagagtgaacttcagaacttgcttc

SEQ ID NO: 860 - DNA, 28 bp, synthetic construct
  misc_feature 1..28: note = Synthetic: RPL22 reverse primer
  source 1..28: mol_type = other DNA
gttctgttaatcttgtttttccgactga

SEQ ID NO: 861 - DNA, 18 bp, synthetic construct
  misc_feature 1..18: note = Synthetic: RPL10L forward primer
  source 1..18: mol_type = other DNA
cagaacccgccacttgtc

SEQ ID NO: 862 - DNA, 20 bp, synthetic construct
  misc_feature 1..20: note = Synthetic: RPL10L reverse primer
  source 1..20: mol_type = other DNA
catggtggccaagaagtgcc

SEQ ID NO: 863 - DNA, 21 bp, synthetic construct
  misc_feature 1..21: note = Synthetic: RPL10L forward primer
  source 1..21: mol_type = other DNA
tccacaaccatcagggatgag

SEQ ID NO: 864 - DNA, 21 bp, synthetic construct
  misc_feature 1..21: note = Synthetic: RPL10L reverse primer
  source 1..21: mol_type = other DNA
gaagtggggcttcacgaagtt

SEQ ID NO: 865 - DNA, 19 bp, synthetic construct
  misc_feature 1..19: note = Synthetic: ROBO2 forward primer
  source 1..19: mol_type = other DNA
gcccaccattgccagtaca

SEQ ID NO: 866 - DNA, 19 bp, synthetic construct
  misc_feature 1..19: note = Synthetic: ROBO2 reverse primer
  source 1..19: mol_type = other DNA
agaagccacgcctcgaaca

SEQ ID NO: 867 - DNA, 22 bp, synthetic construct
  misc_feature 1..22: note = Synthetic: ROBO2 forward primer
  source 1..22: mol_type = other DNA
gatgatagggtcccaacacctc

SEQ ID NO: 868 - DNA, 23 bp, synthetic construct
  misc_feature 1..23: note = Synthetic: ROBO2 reverse primer
  source 1..23: mol_type = other DNA
gagtaagagttgcagtggactgc

SEQ ID NO: 869 - DNA, 24 bp, synthetic construct
  misc_feature 1..24: note = Synthetic: RNF43 forward primer
  source 1..24: mol_type = other DNA
aatggggaaaaatctggcaagctg

SEQ ID NO: 870 - DNA, 20 bp, synthetic construct
  misc_feature 1..20: note = Synthetic: RNF43 reverse primer
  source 1..20: mol_type = other DNA
gacacccacagaggaaaagg

SEQ ID NO: 871 - DNA, 22 bp, synthetic construct
  misc_feature 1..22: note = Synthetic: RNASEL forward primer
  source 1..22: mol_type = other DNA
cacccacagtgttctggtagaa

SEQ ID NO: 872 - DNA, 27 bp, synthetic construct
  misc_feature 1..27: note = Synthetic: RNASEL reverse primer
  source 1..27: mol_type = other DNA
aggatttattttgtgttgctaccacat

SEQ ID NO: 873 - DNA, 26 bp, synthetic construct
  misc_feature 1..26: note = Synthetic: RIT2 forward primer
  source 1..26: mol_type = other DNA
ctctaacagcatcagcaatatcattt

SEQ ID NO: 874 - DNA, 18 bp, synthetic construct
  misc_feature 1..18: note = Synthetic: RIT2 reverse primer
  source 1..18: mol_type = other DNA
agagtacaaggtggtaat

SEQ ID NO: 875 - DNA, 21 bp, synthetic construct
  misc_feature 1..21: note = Synthetic: RIT2 forward primer
  source 1..21: mol_type = other DNA
ttaccaactccccctgctccc

SEQ ID NO: 876 - DNA, 25 bp, synthetic construct
  misc_feature 1..25: note = Synthetic: RIT2 reverse primer
  source 1..25: mol_type = other DNA
gggtaagatggaggtagaaaatgaa

SEQ ID NO: 877 - DNA, 26 bp, synthetic construct
  misc_feature 1..26: note = Synthetic: RIMS2 forward primer
  source 1..26: mol_type = other DNA
ggatgtggaaagcagagatgaatacg

SEQ ID NO: 878 - DNA, 25 bp, synthetic construct
  misc_feature 1..25: note = Synthetic: RIMS2 reverse primer
  source 1..25: mol_type = other DNA
gggttgtggctttactggataacgg

SEQ ID NO: 879 - DNA, 21 bp, synthetic construct
  misc_feature 1..21: note = Synthetic: RIMS2 forward primer
  source 1..21: mol_type = other DNA
ctaccgaagtgatccgaattt

SEQ ID NO: 880 - DNA, 22 bp, synthetic construct
  misc_feature 1..22: note = Synthetic: RIMS2 reverse primer
  source 1..22: mol_type = other DNA
ttcagcatggatccgcatttgt

SEQ ID NO: 881 - DNA, 21 bp, synthetic construct
  misc_feature 1..21: note = Synthetic: RIMS1 forward primer
  source 1..21: mol_type = other DNA
gacgatgctccgacttgtgga

SEQ ID NO: 882 - DNA, 24 bp, synthetic construct
  misc_feature 1..24: note = Synthetic: RIMS1 reverse primer
  source 1..24: mol_type = other DNA
cagaacttagtgcgacaataggag

SEQ ID NO: 883 - DNA, 20 bp, synthetic construct
  misc_feature 1..20: note = Synthetic: RIMS1 forward primer
  source 1..20: mol_type = other DNA
tgggtgcggtcatctctgct

SEQ ID NO: 884 - DNA, 27 bp, synthetic construct
  misc_feature 1..27: note = Synthetic: RIMS1 reverse primer
  source 1..27: mol_type = other DNA
ttatgttcatggaatactcacgttgtt

SEQ ID NO: 885 - DNA, 23 bp, synthetic construct
  misc_feature 1..23: note = Synthetic: RGS7 forward primer
  source 1..23: mol_type = other DNA
aagttcccagaaagtggtgtcat

SEQ ID NO: 886 - DNA, 28 bp, synthetic construct
  misc_feature 1..28: note = Synthetic: RGS7 reverse primer
  source 1..28: mol_type = other DNA
ttagtctactaagttacacggaacagta

SEQ ID NO: 887 - DNA, 25 bp, synthetic construct
  misc_feature 1..25: note = Synthetic: RGS7 forward primer
  source 1..25: mol_type = other DNA
caaaagaaacgggtcgtattctaaa

SEQ ID NO: 888 - DNA, 21 bp, synthetic construct
  misc_feature 1..21: note = Synthetic: RGS7 reverse primer
  source 1..21: mol_type = other DNA
caaccccagtcagaaaactaa

SEQ ID NO: 889 - DNA, 28 bp, synthetic construct
  misc_feature 1..28: note = Synthetic: RGS18 forward primer
  source 1..28: mol_type = other DNA
gcaatgaattccaagatgtacaatcaga

SEQ ID NO: 890 - DNA, 26 bp, synthetic construct
  misc_feature 1..26: note = Synthetic: RGS18 reverse primer
  source 1..26: mol_type = other DNA
tgcgatatgttagaagcagatgtata

SEQ ID NO: 891 - DNA, 18 bp, synthetic construct
  misc_feature 1..18: note = Synthetic: REM1 forward primer
  source 1..18: mol_type = other DNA
ctgagctccgcatccagc

SEQ ID NO: 892 - DNA, 19 bp, synthetic construct
  misc_feature 1..19: note = Synthetic: REM1 reverse primer
  source 1..19: mol_type = other DNA
gatggagggctcaccttcc

SEQ ID NO: 893 - DNA, 18 bp, synthetic construct
  misc_feature 1..18: note = Synthetic: REM1 forward primer
  source 1..18: mol_type = other DNA
ctgccgagaagtctctgt

SEQ ID NO: 894 - DNA, 19 bp, synthetic construct
  misc_feature 1..19: note = Synthetic: REM1 reverse primer
  source 1..19: mol_type = other DNA
ggagcagccatgacagtgg

SEQ ID NO: 895 - DNA, 22 bp, synthetic construct
  misc_feature 1..22: note = Synthetic: REG3G forward primer
  source 1..22: mol_type = other DNA
accccctactcttcattttact

SEQ ID NO: 896 - DNA, 20 bp, synthetic construct
  misc_feature 1..20: note = Synthetic: REG3G reverse primer
  source 1..20: mol_type = other DNA
ctttgggacagctgatccgt

SEQ ID NO: 897 - DNA, 19 bp, synthetic construct
  misc_feature 1..19: note = Synthetic: REG3G forward primer
  source 1..19: mol_type = other DNA
agaaggaactgccctctcc

SEQ ID NO: 898 - DNA, 23 bp, synthetic construct
  misc_feature 1..23: note = Synthetic: REG3G reverse primer
  source 1..23: mol_type = other DNA
tgacaaaaacaaggcatagcagg

SEQ ID NO: 899 - DNA, 23 bp, synthetic construct
  misc_feature 1..23: note = Synthetic: REG3A forward primer
  source 1..23: mol_type = other DNA
cccaatccagacgtatgagtagc

SEQ ID NO: 900 - DNA, 21 bp, synthetic construct
  misc_feature 1..21: note = Synthetic: REG3A reverse primer
  source 1..21: mol_type = other DNA
aacctggtgtctgtgctcagt

SEQ ID NO: 901 - DNA, 20 bp, synthetic construct
  misc_feature 1..20: note = Synthetic: REG3A forward primer
  source 1..20: mol_type = other DNA
ggacacgaaggatccctcag

SEQ ID NO: 902 - DNA, 23 bp, synthetic construct
  misc_feature 1..23: note = Synthetic: REG3A reverse primer
  source 1..23: mol_type = other DNA
gctccctctcattctctttgttg

SEQ ID NO: 903 - DNA, 30 bp, synthetic construct
  misc_feature 1..30: note = Synthetic: REG3A forward primer
  source 1..30: mol_type = other DNA
ctaacattgtattttctagctcaggaagat

SEQ ID NO: 904 - DNA, 17 bp, synthetic construct
  misc_feature 1..17: note = Synthetic: REG3A reverse primer
  source 1..17: mol_type = other DNA
gccccggccactgtgcg

SEQ ID NO: 905 - DNA, 24 bp, synthetic construct
  misc_feature 1..24: note = Synthetic: REG3A forward primer
  source 1..24: mol_type = other DNA
tcttacctgtgcttctcgacaggc

SEQ ID NO: 906 - DNA, 21 bp, synthetic construct
  misc_feature 1..21: note = Synthetic: REG3A reverse primer
  source 1..21: mol_type = other DNA
agcccaatggagaaggttggg

SEQ ID NO: 907 - DNA, 23 bp, synthetic construct
  misc_feature 1..23: note = Synthetic: REG3A forward primer
  source 1..23: mol_type = other DNA
gatggtggagggatttctctccc

SEQ ID NO: 908 - DNA, 23 bp, synthetic construct
  misc_feature 1..23: note = Synthetic: REG3A reverse primer
  source 1..23: mol_type = other DNA
ggctacctcctctactctacagg

SEQ ID NO: 909 - DNA, 21 bp, synthetic construct
  misc_feature 1..21: note = Synthetic: REG1B forward primer
  source 1..21: mol_type = other DNA
acatctgcatcaacccaggtc

SEQ ID NO: 910 - DNA, 19 bp, synthetic construct
  misc_feature 1..19: note = Synthetic: REG1B reverse primer
  source 1..19: mol_type = other DNA
ccaggagtcccagacagag

SEQ ID NO: 911 - DNA, 20 bp, synthetic construct
  misc_feature 1..20: note = Synthetic: REG1B forward primer
  source 1..20: mol_type = other DNA
cagctgattcggggattagg

SEQ ID NO: 912 - DNA, 24 bp, synthetic construct
  misc_feature 1..24: note = Synthetic: REG1B reverse primer
  source 1..24: mol_type = other DNA
taattcaccttccagccttttcct

SEQ ID NO: 913 - DNA, 25 bp, synthetic construct
  misc_feature 1..25: note = Synthetic: REG1B forward primer
  source 1..25: mol_type = other DNA
cgtccctcttacctctcaaaaatgt

SEQ ID NO: 914 - DNA, 22 bp, synthetic construct
  misc_feature 1..22: note = Synthetic: REG1B reverse primer
  source 1..22: mol_type = other DNA
gagagtagcactgatgacagca

SEQ ID NO: 915 - DNA, 21 bp, synthetic construct
  misc_feature 1..21: note = Synthetic: REG1B forward primer
  source 1..21: mol_type = other DNA
tttgggtcatggaggccaatc

SEQ ID NO: 916 - DNA, 22 bp, synthetic construct
  misc_feature 1..22: note = Synthetic: REG1B reverse primer
  source 1..22: mol_type = other DNA
ttcgtggcctcactgattaagg

SEQ ID NO: 917 - DNA, 22 bp, synthetic construct
  misc_feature 1..22: note = Synthetic: REG1B forward primer
  source 1..22: mol_type = other DNA
gcacagtagccagcattagcac

SEQ ID NO: 918 - DNA, 21 bp, synthetic construct
  misc_feature 1..21: note = Synthetic: REG1B reverse primer
  source 1..21: mol_type = other DNA
cttctccatctagaaccgccg

SEQ ID NO: 919 - DNA, 19 bp, synthetic construct
  misc_feature 1..19: note = Synthetic: REG1B forward primer
  source 1..19: mol_type = other DNA
cccactactccagtgccag

SEQ ID NO: 920 - DNA, 24 bp, synthetic construct
  misc_feature 1..24: note = Synthetic: REG1B reverse primer
  source 1..24: mol_type = other DNA
acacaggcctggttattctattga

SEQ ID NO: 921 - DNA, 22 bp, synthetic construct
  misc_feature 1..22: note = Synthetic: REG1A forward primer
  source 1..22: mol_type = other DNA
caggagggtcatactctttcgg

SEQ ID NO: 922 - DNA, 25 bp, synthetic construct
  misc_feature 1..25: note = Synthetic: REG1A reverse primer
  source 1..25: mol_type = other DNA
cctctagtttttgaacttgcagaca

SEQ ID NO: 923 - DNA, 23 bp, synthetic construct
  misc_feature 1..23: note = Synthetic: REG1A forward primer
  source 1..23: mol_type = other DNA
gaaatggaaggatgtgccttgtg

SEQ ID NO: 924 - DNA, 27 bp, synthetic construct
  misc_feature 1..27: note = Synthetic: REG1A reverse primer
  source 1..27: mol_type = other DNA
ttgtaattgctggatcagttctagaca

SEQ ID NO: 925 - DNA, 22 bp, synthetic construct
  misc_feature 1..22: note = Synthetic: RBFOX1 forward primer
  source 1..22: mol_type = other DNA
cctttgactgatgccaagacta

SEQ ID NO: 926 - DNA, 22 bp, synthetic construct
  misc_feature 1..22: note = Synthetic: RBFOX1 reverse primer
  source 1..22: mol_type = other DNA
gttgtatccccctcggtatata

SEQ ID NO: 927 - DNA, 24 bp, synthetic construct
  misc_feature 1..24: note = Synthetic: RBFOX1 forward primer
  source 1..24: mol_type = other DNA
tctttcttcattgcaggctagtat

SEQ ID NO: 928 - DNA, 25 bp, synthetic construct
  misc_feature 1..25: note = Synthetic: RBFOX1 reverse primer
  source 1..25: mol_type = other DNA
cccacattggaaggtttttatggtt

SEQ ID NO: 929 - DNA, 33 bp, synthetic construct
  misc_feature 1..33: note = Synthetic: RB1 forward primer
  source 1..33: mol_type = other DNA
gattttctaaaatagcaggctcttatttttctt

SEQ ID NO: 930 - DNA, 33 bp, synthetic construct
  misc_feature 1..33: note = Synthetic: RB1 reverse primer
  source 1..33: mol_type = other DNA
tttttaacttactgatttaagcatggattccat

SEQ ID NO: 931 - DNA, 23 bp, synthetic construct
  misc_feature 1..23: note = Synthetic: RB1 forward primer
  source 1..23: mol_type = other DNA
gagttcgcttgtattaccgagta

SEQ ID NO: 932 - DNA, 19 bp, synthetic construct
  misc_feature 1..19: note = Synthetic: RB1 reverse primer
  source 1..19: mol_type = other DNA
cgcccggctgaaatttttt

SEQ ID NO: 933 - DNA, 28 bp, synthetic construct
  misc_feature 1..28: note = Synthetic: RB1 forward primer
  source 1..28: mol_type = other DNA
gtttgaagaaacagaagaacctgatttt

SEQ ID NO: 934 - DNA, 28 bp, synthetic construct
  misc_feature 1..28: note = Synthetic: RB1 reverse primer
  source 1..28: mol_type = other DNA
aaaatccttaccaatactccatccacag

SEQ ID NO: 935 - DNA, 24 bp, synthetic construct
  misc_feature 1..24: note = Synthetic: RB1 forward primer
  source 1..24: mol_type = other DNA
agcttggttaacttgggagaaagt

SEQ ID NO: 936 - DNA, 24 bp, synthetic construct
  misc_feature 1..24: note = Synthetic: RB1 reverse primer
  source 1..24: mol_type = other DNA
tagtgatttgaagttgtttttaaa

SEQ ID NO: 937 - DNA, 34 bp, synthetic construct
  misc_feature 1..34: note = Synthetic: RB1 forward primer
  source 1..34: mol_type = other DNA
ttataatacagttttaacatagtatccagtgtgt

SEQ ID NO: 938 - DNA, 27 bp, synthetic construct
  misc_feature 1..27: note = Synthetic: RB1 reverse primer
  source 1..27: mol_type = other DNA
ggtcaactgctgcaataaagatacaga

SEQ ID NO: 939 - DNA, 20 bp, synthetic construct
  misc_feature 1..20: note = Synthetic: RB1 forward primer
  source 1..20: mol_type = other DNA
ttttgttcccagggaggtta

SEQ ID NO: 940 - DNA, 27 bp, synthetic construct
  misc_feature 1..27: note = Synthetic: RB1 reverse primer
  source 1..27: mol_type = other DNA
gtagctcagtaaaagtgaacgacatct

SEQ ID NO: 941 - DNA, 20 bp, synthetic construct
  misc_feature 1..20: note = Synthetic: RB1 forward primer
  source 1..20: mol_type = other DNA
aggagtgcacggatagcaaa

SEQ ID NO: 942 - DNA, 34 bp, synthetic construct
  misc_feature 1..34: note = Synthetic: RB1 reverse primer
  source 1..34: mol_type = other DNA
agaacttacatctaaatctactttaactgtttta

SEQ ID NO: 943 - DNA, 17 bp, synthetic construct
  misc_feature 1..17: note = Synthetic: RASGRF1 forward primer
  source 1..17: mol_type = other DNA
gctcccacccacctgag

SEQ ID NO: 944 - DNA, 21 bp, synthetic construct
  misc_feature 1..21: note = Synthetic: RASGRF1 reverse primer
  source 1..21: mol_type = other DNA
tttgtgatccgcagagcagcc

SEQ ID NO: 945 - DNA, 20 bp, synthetic construct
  misc_feature 1..20: note = Synthetic: RASGRF1 forward primer
  source 1..20: mol_type = other DNA
agcacgttcaagacacgatt

SEQ ID NO: 946 - DNA, 21 bp, synthetic construct
  misc_feature 1..21: note = Synthetic: RASGRF1 reverse primer
  source 1..21: mol_type = other DNA
agaccagaggaatggagacaa

SEQ ID NO: 947 - DNA, 21 bp, synthetic construct
  misc_feature 1..21: note = Synthetic: RASAL2 forward primer
  source 1..21: mol_type = other DNA
aggagcagcagacagattcca

SEQ ID NO: 948 - DNA, 20 bp, synthetic construct
  misc_feature 1..20: note = Synthetic: RASAL2 reverse primer
  source 1..20: mol_type = other DNA
gggtactcgggaaactgacc

SEQ ID NO: 949 - DNA, 20 bp, synthetic construct
  misc_feature 1..20: note = Synthetic: RASAL2 forward primer
  source 1..20: mol_type = other DNA
tgtcagtgtcccttccgagg

SEQ ID NO: 950 - DNA, 28 bp, synthetic construct
  misc_feature 1..28: note = Synthetic: RASAL2 reverse primer
  source 1..28: mol_type = other DNA
tcatagtagcttacccagtttagtggcg

SEQ ID NO: 951 - DNA, 20 bp, synthetic construct
  misc_feature 1..20: note = Synthetic: RAF1 forward primer
  source 1..20: mol_type = other DNA
aaggtgccctattacctcaa

SEQ ID NO: 952 - DNA, 21 bp, synthetic construct
  misc_feature 1..21: note = Synthetic: RAF1 reverse primer
  source 1..21: mol_type = other DNA
tgaaggttccctctcccagag

SEQ ID NO: 953 - DNA, 20 bp, synthetic construct
  misc_feature 1..20: note = Synthetic: RAF1 forward primer
  source 1..20: mol_type = other DNA
gtgtggatgtcgacctctgc

SEQ ID NO: 954 - DNA, 22 bp, synthetic construct
  misc_feature 1..22: note = Synthetic: RAF1 reverse primer
  source 1..22: mol_type = other DNA
ctcacgccttcacctttaacac

SEQ ID NO: 955 - DNA, 31 bp, synthetic construct
  misc_feature 1..31: note = Synthetic: RAD51AP2 forward primer
  source 1..31: mol_type = other DNA
tacagtagtttgaactgatcaagtcttttct

SEQ ID NO: 956 - DNA, 31 bp, synthetic construct
  misc_feature 1..31: note = Synthetic: RAD51AP2 reverse primer
  source 1..31: mol_type = other DNA
tgatgttaagaagcaaaagttacagaatgat

SEQ ID NO: 957 - DNA, 23 bp, synthetic construct
  misc_feature 1..23: note = Synthetic: RAD51AP2 forward primer
  source 1..23: mol_type = other DNA
aaaatgttttccgcttctacagt

SEQ ID NO: 958 - DNA, 28 bp, synthetic construct
  misc_feature 1..28: note = Synthetic: RAD51AP2 reverse primer
  source 1..28: mol_type = other DNA
acaaacatttactggtcccaaaatagac

SEQ ID NO: 959 - DNA, 17 bp, synthetic construct
  misc_feature 1..17: note = Synthetic: PXDN forward primer
  source 1..17: mol_type = other DNA
ggagcgcacgaagaaca

SEQ ID NO: 960 - DNA, 18 bp, synthetic construct
  misc_feature 1..18: note = Synthetic: PXDN reverse primer
  source 1..18: mol_type = other DNA
caacgtgtgcagcaacga

SEQ ID NO: 961 - DNA, 19 bp, synthetic construct
  misc_feature 1..19: note = Synthetic: PXDN forward primer
  source 1..19: mol_type = other DNA
gggatcatgacagagaagc

SEQ ID NO: 962 - DNA, 18 bp, synthetic construct
  misc_feature 1..18: note = Synthetic: PXDN reverse primer
  source 1..18: mol_type = other DNA
agttcctggaccacgacc

SEQ ID NO: 963 - DNA, 20 bp, synthetic construct
  misc_feature 1..20: note = Synthetic: PUS7 forward primer
  source 1..20: mol_type = other DNA
aggcacgtcttcactgatgg

SEQ ID NO: 964 - DNA, 21 bp, synthetic construct
  misc_feature 1..21: note = Synthetic: PUS7 reverse primer
  source 1..21: mol_type = other DNA
cagaagctgtcggaatgcagt

SEQ ID NO: 965 - DNA, 24 bp, synthetic construct
  misc_feature 1..24: note = Synthetic: PUS7 forward primer
  source 1..24: mol_type = other DNA
cccatcttgacctttggttagact

SEQ ID NO: 966 - DNA, 24 bp, synthetic construct
  misc_feature 1..24: note = Synthetic: PUS7 reverse primer
  source 1..24: mol_type = other DNA
ctggttgtcgaagataatgacagt

SEQ ID NO: 967 - DNA, 24 bp, synthetic construct
  misc_feature 1..24: note = Synthetic: PTPN11 forward primer
  source 1..24: mol_type = other DNA
taggtgttgactgcgatattgacg

SEQ ID NO: 968 - DNA, 24 bp, synthetic construct
  misc_feature 1..24: note = Synthetic: PTPN11 reverse primer
  source 1..24: mol_type = other DNA
accgccatatagataaatcggtac

SEQ ID NO: 969 - DNA, 21 bp, synthetic construct
  misc_feature 1..21: note = Synthetic: PTPN11 forward primer
  source 1..21: mol_type = other DNA
agggatggtccagacagaagc

SEQ ID NO: 970 - DNA, 23 bp, synthetic construct
  misc_feature 1..23: note = Synthetic: PTPN11 reverse primer
  source 1..23: mol_type = other DNA
cttcttcaatcctgcgctgtagt

SEQ ID NO: 971 - DNA, 22 bp, synthetic construct
  misc_feature 1..22: note = Synthetic: PTPN11 forward primer
  source 1..22: mol_type = other DNA
aaatggagctgtcacccacatc

SEQ ID NO: 972 - DNA, 21 bp, synthetic construct
  misc_feature 1..21: note = Synthetic: PTPN11 reverse primer
  source 1..21: mol_type = other DNA
tggaccaactcagccaaagtg

SEQ ID NO: 973 - DNA, 23 bp, synthetic construct
  misc_feature 1..23: note = Synthetic: PTPN11 forward primer
  source 1..23: mol_type = other DNA
tatgacctgtatggaggggagaa

SEQ ID NO: 974 - DNA, 24 bp, synthetic construct
  misc_feature 1..24: note = Synthetic: PTPN11 reverse primer
  source 1..24: mol_type = other DNA
tgcccgtgatgttccatgtaatac

SEQ ID NO: 975 - DNA, 28 bp, synthetic construct
  misc_feature 1..28: note = Synthetic: PTGER3 forward primer
  source 1..28: mol_type = other DNA
tagataatgagataggctgccctttctg

SEQ ID NO: 976 - DNA, 22 bp, synthetic construct
  misc_feature 1..22: note = Synthetic: PTGER3 reverse primer
  source 1..22: mol_type = other DNA
gatcttggatccttgggtttac

SEQ ID NO: 977 - DNA, 24 bp, synthetic construct
  misc_feature 1..24: note = Synthetic: PTGER3 forward primer
  source 1..24: mol_type = other DNA
tacctggcaaaactttcgaagaag

SEQ ID NO: 978 - DNA, 19 bp, synthetic construct
  misc_feature 1..19: note = Synthetic: PTGER3 reverse primer
  source 1..19: mol_type = other DNA
gttcgcctggcttcactga

SEQ ID NO: 979 - DNA, 29 bp, synthetic construct
  misc_feature 1..29: note = Synthetic: PTEN forward primer
  source 1..29: mol_type = other DNA
ctcatttttgttaatggtggctttttgtt

SEQ ID NO: 980 - DNA, 33 bp, synthetic construct
  misc_feature 1..33: note = Synthetic: PTEN reverse primer
  source 1..33: mol_type = other DNA
gttttagaagatatttgcaagcatacaaataag

SEQ ID NO: 981 - DNA, 23 bp, synthetic construct
  misc_feature 1..23: note = Synthetic: PTEN forward primer
  source 1..23: mol_type = other DNA
cctcctttttcttcagccacagg

SEQ ID NO: 982 - DNA, 29 bp, synthetic construct
  misc_feature 1..29: note = Synthetic: PTEN reverse primer
  source 1..29: mol_type = other DNA
ctaagtcgaatccatcctcttgatatctc

SEQ ID NO: 983 - DNA, 25 bp, synthetic construct
  misc_feature 1..25: note = Synthetic: PTEN forward primer
  source 1..25: mol_type = other DNA
ccatcatcaaagagatcgttagcag

SEQ ID NO: 984 - DNA, 21 bp, synthetic construct
  misc_feature 1..21: note = Synthetic: PTEN reverse primer
  source 1..21: mol_type = other DNA
cagccgcagaaatggatacag

SEQ ID NO: 985 - DNA, 26 bp, synthetic construct
  misc_feature 1..26: note = Synthetic: PTEN forward primer
  source 1..26: mol_type = other DNA
tgaagatcttgaccaatggctaagtg

SEQ ID NO: 986 - DNA, 27 bp, synthetic construct
  misc_feature 1..27: note = Synthetic: PTEN reverse primer
  source 1..27: mol_type = other DNA
tgccccgatgtaataaatatgcacata

SEQ ID NO: 987 - DNA, 23 bp, synthetic construct
  misc_feature 1..23: note = Synthetic: PTEN forward primer
  source 1..23: mol_type = other DNA
taaagctggaaagggacgaactg

SEQ ID NO: 988 - DNA, 28 bp, synthetic construct
  misc_feature 1..28: note = Synthetic: PTEN reverse primer
  source 1..28: mol_type = other DNA
taacttacctttttgtctctggtcctta

SEQ ID NO: 989 - DNA, 21 bp, synthetic construct
  misc_feature 1..21: note = Synthetic: PTEN forward primer
  source 1..21: mol_type = other DNA
cacaagaggccctagatttct

SEQ ID NO: 990 - DNA, 23 bp, synthetic construct
  misc_feature 1..23: note = Synthetic: PTEN reverse primer
  source 1..23: mol_type = other DNA
agatccaggaagaggaaaggaaa

SEQ ID NO: 991 - DNA, 34 bp, synthetic construct
  misc_feature 1..34: note = Synthetic: PTEN forward primer
  source 1..34: mol_type = other DNA
agttaccatagcaatttagtgaaataactataat

SEQ ID NO: 992 - DNA, 34 bp, synthetic construct
  misc_feature 1..34: note = Synthetic: PTEN reverse primer
  source 1..34: mol_type = other DNA
ccagatgattctttaacaggtagctataataata

SEQ ID NO: 993 - DNA, 27 bp, synthetic construct
  misc_feature 1..27: note = Synthetic: PTEN forward primer
  source 1..27: mol_type = other DNA
acagttaaaggcatttcctgtgaaata

SEQ ID NO: 994 - DNA, 20 bp, synthetic construct
  misc_feature 1..20: note = Synthetic: PTEN reverse primer
  source 1..20: mol_type = other DNA
gtgtgggtcctgaattggag

SEQ ID NO: 995 - DNA, 22 bp, synthetic construct
  misc_feature 1..22: note = Synthetic: PTEN forward primer
  source 1..22: mol_type = other DNA
ttgtggtctgccagctaaaggt

SEQ ID NO: 996 - DNA, 18 bp, synthetic construct
  misc_feature 1..18: note = Synthetic: PTEN reverse primer
  source 1..18: mol_type = other DNA
cacaggtaacggctgagg

SEQ ID NO: 997 - DNA, 18 bp, synthetic construct
  misc_feature 1..18: note = Synthetic: PTEN forward primer
  source 1..18: mol_type = other DNA
cacacgacgggaagacaa

SEQ ID NO: 998 - DNA, 26 bp, synthetic construct
  misc_feature 1..26: note = Synthetic: PTEN reverse primer
  source 1..26: mol_type = other DNA
tttagcatcttgttctgtttgtggaa

SEQ ID NO: 999 - DNA, 25 bp, synthetic construct
  misc_feature 1..25: note = Synthetic: PTEN forward primer
  source 1..25: mol_type = other DNA
tgtggtgatatcaaagtagagttct

SEQ ID NO: 1000 - DNA, 31 bp, synthetic construct
  misc_feature 1..31: note = Synthetic: PTEN reverse primer
  source 1..31: mol_type = other DNA
ggatatttctcccaatgaaagtaaagtacaa

SEQ ID NO: 1001 - DNA, 24 bp, synthetic construct
  misc_feature 1..24: note = Synthetic: PTEN forward primer
  source 1..24: mol_type = other DNA
ttcataccaggaccagaggaaacc

SEQ ID NO: 1002 - DNA, 34 bp, synthetic construct
  misc_feature 1..34: note = Synthetic: PTEN reverse primer
  source 1..34: mol_type = other DNA
ttttgttaaagtaagtactagatattccttgtca

SEQ ID NO: 1003 - DNA, 30 bp, synthetic construct
  misc_feature 1..30: note = Synthetic: PTEN forward primer
  source 1..30: mol_type = other DNA
agaaatcgatagcatttgcagtatagagcg

SEQ ID NO: 1004 - DNA, 30 bp, synthetic construct
  misc_feature 1..30: note = Synthetic: PTEN reverse primer
  source 1..30: mol_type = other DNA
gaccttaaaatttggagaaaagtatcggtt

SEQ ID NO: 1005 - DNA, 30 bp, synthetic construct
  misc_feature 1..30: note = Synthetic: PTEN forward primer
  source 1..30: mol_type = other DNA
aatgatcttgacaaagcaaataaagacaaa

SEQ ID NO: 1006 - DNA, 29 bp, synthetic construct
  misc_feature 1..29: note = Synthetic: PTEN reverse primer
  source 1..29: mol_type = other DNA
atcagctgtactcctagaattaaacacac

SEQ ID NO: 1007 - DNA, 32 bp, synthetic construct
  misc_feature 1..32: note = Synthetic: PTEN forward primer
  source 1..32: mol_type = other DNA
tgcatatttcagatatttctttccttaactaa

SEQ ID NO: 1008 - DNA, 33 bp, synthetic construct
  misc_feature 1..33: note = Synthetic: PTEN reverse primer
  source 1..33: mol_type = other DNA
cattcttaccttactacatcatcaatattgttc

SEQ ID NO: 1009 - DNA, 23 bp, synthetic construct
  misc_feature 1..23: note = Synthetic: PTEN forward primer
  source 1..23: mol_type = other DNA
cagaaagacttgaaggcgtatac

SEQ ID NO: 1010 - DNA, 31 bp, synthetic construct
  misc_feature 1..31: note = Synthetic: PTEN reverse primer
  source 1..31: mol_type = other DNA
aagtatctttttctgtggcttagaaatcttt

SEQ ID NO: 1011 - DNA, 24 bp, synthetic construct
  misc_feature 1..24: note = Synthetic: PSTK forward primer
  source 1..24: mol_type = other DNA
ccagtcttgctacctcttaacaaa

SEQ ID NO: 1012 - DNA, 20 bp, synthetic construct
  misc_feature 1..20: note = Synthetic: PSTK reverse primer
  source 1..20: mol_type = other DNA
atttccgagccagctggtag

SEQ ID NO: 1013 - DNA, 26 bp, synthetic construct
  misc_feature 1..26: note = Synthetic: PROL1 forward primer
  source 1..26: mol_type = other DNA
acatttcccactaagaccttactatg

SEQ ID NO: 1014 - DNA, 23 bp, synthetic construct
  misc_feature 1..23: note = Synthetic: PROL1 reverse primer
  source 1..23: mol_type = other DNA
ctcagggttagagataggaaggt

SEQ ID NO: 1015 - DNA, 20 bp, synthetic construct
  misc_feature 1..20: note = Synthetic: PRKCG forward primer
  source 1..20: mol_type = other DNA
cgtccagggacctgaagctg

SEQ ID NO: 1016 - DNA, 18 bp, synthetic construct
  misc_feature 1..18: note = Synthetic: PRKCG reverse primer
  source 1..18: mol_type = other DNA
gtgcgggttgtcgtcccg

SEQ ID NO: 1017 - DNA, 22 bp, synthetic construct
  misc_feature 1..22: note = Synthetic: PRKCG forward primer
  source 1..22: mol_type = other DNA
atgtgtaaggagaacgtcttcc

SEQ ID NO: 1018 - DNA, 21 bp, synthetic construct
  misc_feature 1..21: note = Synthetic: PRKCG reverse primer
  source 1..21: mol_type = other DNA
ctccggggctatgtagtccgg

SEQ ID NO: 1019 - DNA, 27 bp, synthetic construct
  misc_feature 1..27: note = Synthetic: PRIM2 forward primer
  source 1..27: mol_type = other DNA
tttcttgtagctttctaccaaatcctt

SEQ ID NO: 1020 - DNA, 27 bp, synthetic construct
  misc_feature 1..27: note = Synthetic: PRIM2 reverse primer
  source 1..27: mol_type = other DNA
taaaccaatgcccttcagaaataggac

SEQ ID NO: 1021 - DNA, 17 bp, synthetic construct
  misc_feature 1..17: note = Synthetic: PRCC forward primer
  source 1..17: mol_type = other DNA
tcccccgccgctgttgc

SEQ ID NO: 1022 - DNA, 19 bp, synthetic construct
  misc_feature 1..19: note = Synthetic: PRCC reverse primer
  source 1..19: mol_type = other DNA
tcccagtccctccccaact

SEQ ID NO: 1023 - DNA, 21 bp, synthetic construct
  misc_feature 1..21: note = Synthetic: PPP3CA forward primer
  source 1..21: mol_type = other DNA
gagttaaggttggcgtcagag

SEQ ID NO: 1024 - DNA, 27 bp, synthetic construct
  misc_feature 1..27: note = Synthetic: PPP3CA reverse primer
  source 1..27: mol_type = other DNA
acaacataagatcactagcttcgagga

SEQ ID NO: 1025 - DNA, 20 bp, synthetic construct
  misc_feature 1..20: note = Synthetic: PPP2R1A forward primer
  source 1..20: mol_type = other DNA
ccggaacctgtgctcagatg

SEQ ID NO: 1026 - DNA, 20 bp, synthetic construct
  misc_feature 1..20: note = Synthetic: PPP2R1A reverse primer
  source 1..20: mol_type = other DNA
tccagcaccttggcaaactc

SEQ ID NO: 1027 - DNA, 26 bp, synthetic construct
  misc_feature 1..26: note = Synthetic: PPP1R9A forward primer
  source 1..26: mol_type = other DNA
actgaaaagtacctttgacaaaccca

SEQ ID NO: 1028 - DNA, 29 bp, synthetic construct
  misc_feature 1..29: note = Synthetic: PPP1R9A reverse primer
  source 1..29: mol_type = other DNA
atacccatctgcataaataggtttttaat

SEQ ID NO: 1029 - DNA, 22 bp, synthetic construct
  misc_feature 1..22: note = Synthetic: PPP1R9A forward primer
  source 1..22: mol_type = other DNA
gggaggaaatatggctccaatg

SEQ ID NO: 1030 - DNA, 21 bp, synthetic construct
  misc_feature 1..21: note = Synthetic: PPP1R9A reverse primer
  source 1..21: mol_type = other DNA
gcaatgactgcagcattctcg

SEQ ID NO: 1031 - DNA, 18 bp, synthetic construct
  misc_feature 1..18: note = Synthetic: PPP1R35 forward primer
  source 1..18: mol_type = other DNA
cggagttgcgggacttgg

SEQ ID NO: 1032 - DNA, 19 bp, synthetic construct
  misc_feature 1..19: note = Synthetic: PPP1R35 reverse primer
  source 1..19: mol_type = other DNA
ggttgtggggagtcagagc

SEQ ID NO: 1033 - DNA, 22 bp, synthetic construct
  misc_feature 1..22: note = Synthetic: PPFIA1 forward primer
  source 1..22: mol_type = other DNA
gtgaagatgacagggacactct

SEQ ID NO: 1034 - DNA, 20 bp, synthetic construct
  misc_feature 1..20: note = Synthetic: PPFIA1 reverse primer
  source 1..20: mol_type = other DNA
gctcctgaagcatcatggct

SEQ ID NO: 1035 - DNA, 17 bp, synthetic construct
  misc_feature 1..17: note = Synthetic: PPFIA1 forward primer
  source 1..17: mol_type = other DNA
ccgacgcgcacacacta

SEQ ID NO: 1036 - DNA, 22 bp, synthetic construct
  misc_feature 1..22: note = Synthetic: PPFIA1 reverse primer
  source 1..22: mol_type = other DNA
cacctgatctctttgttgatgg

SEQ ID NO: 1037 - DNA, 17 bp, synthetic construct
  misc_feature 1..17: note = Synthetic: POM121L12 forward primer
  source 1..17: mol_type = other DNA
gccccctgagcgtcagg

SEQ ID NO: 1038 - DNA, 17 bp, synthetic construct
  misc_feature 1..17: note = Synthetic: POM121L12 reverse primer
  source 1..17: mol_type = other DNA
gtgcaggggtccaggag

SEQ ID NO: 1039 - DNA, 19 bp, synthetic construct
  misc_feature 1..19: note = Synthetic: POM121L12 forward primer
  source 1..19: mol_type = other DNA
tggagatcccctggacaga

SEQ ID NO: 1040 - DNA, 18 bp, synthetic construct
  misc_feature 1..18: note = Synthetic: POM121L12 reverse primer
  source 1..18: mol_type = other DNA
ggggcactggctgagcgc

SEQ ID NO: 1041 - DNA, 17 bp, synthetic construct
  misc_feature 1..17: note = Synthetic: POM121L12 forward primer
  source 1..17: mol_type = other DNA
gcacccgggagactctg

SEQ ID NO: 1042 - DNA, 18 bp, synthetic construct
  misc_feature 1..18: note = Synthetic: POM121L12 reverse primer
  source 1..18: mol_type = other DNA
gtcgaacctagcgcttcc

SEQ ID NO: 1043 - DNA, 19 bp, synthetic construct
  misc_feature 1..19: note = Synthetic: POM121L12 forward primer
  source 1..19: mol_type = other DNA
agcggttgcttccttcgtg

SEQ ID NO: 1044 - DNA, 20 bp, synthetic construct
  misc_feature 1..20: note = Synthetic: POM121L12 reverse primer
  source 1..20: mol_type = other DNA
aagtcccagatggcggatgg

SEQ ID NO: 1045 - DNA, 20 bp, synthetic construct
  misc_feature 1..20: note = Synthetic: POM121L12 forward primer
  source 1..20: mol_type = other DNA
gatgcttggccttccgtgct

SEQ ID NO: 1046 - DNA, 18 bp, synthetic construct
  misc_feature 1..18: note = Synthetic: POM121L12 reverse primer
  source 1..18: mol_type = other DNA
aggaaggcgttgtcgcct

SEQ ID NO: 1047 - DNA, 22 bp, synthetic construct
  misc_feature 1..22: note = Synthetic: PNLIPRP3 forward primer
  source 1..22: mol_type = other DNA
ccatttttccacaacactccaa

SEQ ID NO: 1048 - DNA, 21 bp, synthetic construct
  misc_feature 1..21: note = Synthetic: PNLIPRP3 reverse primer
  source 1..21: mol_type = other DNA
agctcaaagaggatgcgagct

SEQ ID NO: 1049 - DNA, 26 bp, synthetic construct
  misc_feature 1..26: note = Synthetic: PNLIPRP3 forward primer
  source 1..26: mol_type = other DNA
tgccaactttgttgacgttattcata

SEQ ID NO: 1050 - DNA, 27 bp, synthetic construct
  misc_feature 1..27: note = Synthetic: PNLIPRP3 reverse primer
  source 1..27: mol_type = other DNA
tctaaaaatctcctctatgcttcaatg

SEQ ID NO: 1051 - DNA, 21 bp, synthetic construct
  misc_feature 1..21: note = Synthetic: PLSCR5 forward primer
  source 1..21: mol_type = other DNA
caaggaccaacaattttcaaa

SEQ ID NO: 1052 - DNA, 22 bp, synthetic construct
  misc_feature 1..22: note = Synthetic: PLSCR5 reverse primer
  source 1..22: mol_type = other DNA
ctcctggtactatagttggtta

SEQ ID NO: 1053 - DNA, 19 bp, synthetic construct
  misc_feature 1..19: note = Synthetic: PLSCR5 forward primer
  source 1..19: mol_type = other DNA
tcccacttctgcgtaacgt

SEQ ID NO: 1054 - DNA, 34 bp, synthetic construct
  misc_feature 1..34: note = Synthetic: PLSCR5 reverse primer
  source 1..34: mol_type = other DNA
tatcattatctcttcttacagttagaaatccaag

SEQ ID NO: 1055 - DNA, 21 bp, synthetic construct
  misc_feature 1..21: note = Synthetic: PLEKHA6 forward primer
  source 1..21: mol_type = other DNA
gctggttcatggagctcttgc

SEQ ID NO: 1056 - DNA, 19 bp, synthetic construct
  misc_feature 1..19: note = Synthetic: PLEKHA6 reverse primer
  source 1..19: mol_type = other DNA
cacagctttcccgtctcag

SEQ ID NO: 1057 - DNA, 26 bp, synthetic construct
  misc_feature 1..26: note = Synthetic: PLEKHA6 forward primer
  source 1..26: mol_type = other DNA
cgctctagccataataccatatcagc

SEQ ID NO: 1058 - DNA, 21 bp, synthetic construct
  misc_feature 1..21: note = Synthetic: PLEKHA6 reverse primer
  source 1..21: mol_type = other DNA
cttcagcagtgggtgaatctg

SEQ ID NO: 1059 - DNA, 27 bp, synthetic construct
  misc_feature 1..27: note = Synthetic: PLCXD3 forward primer
  source 1..27: mol_type = other DNA
actgaacaaaccatgagcaaaatagag

SEQ ID NO: 1060 - DNA, 24 bp, synthetic construct
  misc_feature 1..24: note = Synthetic: PLCXD3 reverse primer
  source 1..24: mol_type = other DNA
aattttactggccagctaggagct

SEQ ID NO: 1061 - DNA, 22 bp, synthetic construct
  misc_feature 1..22: note = Synthetic: PLCXD3 forward primer
  source 1..22: mol_type = other DNA
ggcttggtggaaattcgaagat

SEQ ID NO: 1062 - DNA, 25 bp, synthetic construct
  misc_feature 1..25: note = Synthetic: PLCXD3 reverse primer
  source 1..25: mol_type = other DNA
aaaaagctcatgcggaaatggttag

SEQ ID NO: 1063 - DNA, 22 bp, synthetic construct
  misc_feature 1..22: note = Synthetic: PKHD1L1 forward primer
  source 1..22: mol_type = other DNA
ccatcctatgacagaaacattt

SEQ ID NO: 1064 - DNA, 25 bp, synthetic construct
  misc_feature 1..25: note = Synthetic: PKHD1L1 reverse primer
  source 1..25: mol_type = other DNA
agatccacattccaaaccaaccttg

SEQ ID NO: 1065 - DNA, 23 bp, synthetic construct
  misc_feature 1..23: note = Synthetic: PKHD1L1 forward primer
  source 1..23: mol_type = other DNA
ttaacaatactgtccattctcaa

SEQ ID NO: 1066 - DNA, 23 bp, synthetic construct
  misc_feature 1..23: note = Synthetic: PKHD1L1 reverse primer
  source 1..23: mol_type = other DNA
tttgcatggggaaatattcctca

SEQ ID NO: 1067 - DNA, 27 bp, synthetic construct
  misc_feature 1..27: note = Synthetic: PIK3R1 forward primer
  source 1..27: mol_type = other DNA
gtggtcactaaaccttaagatgagcat

SEQ ID NO: 1068 - DNA, 22 bp, synthetic construct
  misc_feature 1..22: note = Synthetic: PIK3R1 reverse primer
  source 1..22: mol_type = other DNA
aaaggtcccgtctgctgtatct

SEQ ID NO: 1069 - DNA, 30 bp, synthetic construct
  misc_feature 1..30: note = Synthetic: PIK3R1 forward primer
  source 1..30: mol_type = other DNA
aagaagataatattgaagctgtagggaaaa

SEQ ID NO: 1070 - DNA, 23 bp, synthetic construct
  misc_feature 1..23: note = Synthetic: PIK3R1 reverse primer
  source 1..23: mol_type = other DNA
atgtgcgggtatattcttcatat

SEQ ID NO: 1071 - DNA, 32 bp, synthetic construct
  misc_feature 1..32: note = Synthetic: PIK3R1 forward primer
  source 1..32: mol_type = other DNA
atgaatataacactcagtttcaagaaaaaagt

SEQ ID NO: 1072 - DNA, 28 bp, synthetic construct
  misc_feature 1..28: note = Synthetic: PIK3R1 reverse primer
  source 1..28: mol_type = other DNA
ccatgttagtctttaaaagtttagaact

SEQ ID NO: 1073 - DNA, 20 bp, synthetic construct
  misc_feature 1..20: note = Synthetic: PIK3R1 forward primer
  source 1..20: mol_type = other DNA
gcaggcagctgagtatcgag

SEQ ID NO: 1074 - DNA, 34 bp, synthetic construct
  misc_feature 1..34: note = Synthetic: PIK3R1 reverse primer
  source 1..34: mol_type = other DNA
gattccatttcaaatacttacatcaagtattggt

SEQ ID NO: 1075 - DNA, 23 bp, synthetic construct
  misc_feature 1..23: note = Synthetic: PIK3R1 forward primer
  source 1..23: mol_type = other DNA
ttatccagctgagaaagacgaga

SEQ ID NO: 1076 - DNA, 27 bp, synthetic construct
  misc_feature 1..27: note = Synthetic: PIK3R1 reverse primer
  source 1..27: mol_type = other DNA
gaacgcattaactcatcctgaattgta

SEQ ID NO: 1077 - DNA, 20 bp, synthetic construct
  misc_feature 1..20: note = Synthetic: PIK3IP1 forward primer
  source 1..20: mol_type = other DNA
agacaagggcagagtgattc

SEQ ID NO: 1078 - DNA, 22 bp, synthetic construct
  misc_feature 1..22: note = Synthetic: PIK3IP1 reverse primer
  source 1..22: mol_type = other DNA
agggggaaggatttgaaagaac

SEQ ID NO: 1079 - DNA, 26 bp, synthetic construct
  misc_feature 1..26: note = Synthetic: PIK3IP1 forward primer
  source 1..26: mol_type = other DNA
ccctctcacatactttctgatcatgc

SEQ ID NO: 1080 - DNA, 27 bp, synthetic construct
  misc_feature 1..27: note = Synthetic: PIK3IP1 reverse primer
  source 1..27: mol_type = other DNA
atgctatctaatgagcaaagctatgca

SEQ ID NO: 1081 - DNA, 26 bp, synthetic construct
  misc_feature 1..26: note = Synthetic: PIK3CG forward primer
  source 1..26: mol_type = other DNA
gcaaagttcagcttctctattatgtg

SEQ ID NO: 1082 - DNA, 22 bp, synthetic construct
  misc_feature 1..22: note = Synthetic: PIK3CG reverse primer
  source 1..22: mol_type = other DNA
atctgccacatgtggaggacgt

SEQ ID NO: 1083 - DNA, 17 bp, synthetic construct
  misc_feature 1..17: note = Synthetic: PIK3CG forward primer
  source 1..17: mol_type = other DNA
tgcgccgtggagaatac

SEQ ID NO: 1084 - DNA, 23 bp, synthetic construct
  misc_feature 1..23: note = Synthetic: PIK3CG reverse primer
  source 1..23: mol_type = other DNA
attgaagcttccttggtcttctc

SEQ ID NO: 1085 - DNA, 29 bp, synthetic construct
  misc_feature 1..29: note = Synthetic: PIK3CA forward primer
  source 1..29: mol_type = other DNA
aaacatctacaaaatccctttgggttata

SEQ ID NO: 1086 - DNA, 29 bp, synthetic construct
  misc_feature 1..29: note = Synthetic: PIK3CA reverse primer
  source 1..29: mol_type = other DNA
catttgactttaccttatcaatgtctcga

SEQ ID NO: 1087 - DNA, 28 bp, synthetic construct
  misc_feature 1..28: note = Synthetic: PIK3CA forward primer
  source 1..28: mol_type = other DNA
tgtgcaacctacgtgaatgtaaatattc

SEQ ID NO: 1088 - DNA, 31 bp, synthetic construct
  misc_feature 1..31: note = Synthetic: PIK3CA reverse primer
  source 1..31: mol_type = other DNA
actacaggtcaacagattactgtatagtgca

SEQ ID NO: 1089 - DNA, 25 bp, synthetic construct
  misc_feature 1..25: note = Synthetic: PIK3CA forward primer
  source 1..25: mol_type = other DNA
gtgcatatgtgtatgttgagtgtat

SEQ ID NO: 1090 - DNA, 25 bp, synthetic construct
  misc_feature 1..25: note = Synthetic: PIK3CA reverse primer
  source 1..25: mol_type = other DNA
tgttcacattgtcacataagggttc

SEQ ID NO: 1091 - DNA, 26 bp, synthetic construct
  misc_feature 1..26: note = Synthetic: PIK3CA forward primer
  source 1..26: mol_type = other DNA
cttttggggaagaaaagtgttttgaa

SEQ ID NO: 1092 - DNA, 25 bp, synthetic construct
  misc_feature 1..25: note = Synthetic: PIK3CA reverse primer
  source 1..25: mol_type = other DNA
agtgtctgtgtaatcaaacaagttt

SEQ ID NO: 1093 - DNA, 31 bp, synthetic construct
  misc_feature 1..31: note = Synthetic: PIK3CA forward primer
  source 1..31: mol_type = other DNA
tatctggaaaaatggctttgaatctttggcc

SEQ ID NO: 1094 - DNA, 27 bp, synthetic construct
  misc_feature 1..27: note = Synthetic: PIK3CA reverse primer
  source 1..27: mol_type = other DNA
atttgatccagtaacaccaatagggtt

SEQ ID NO: 1095 - DNA, 26 bp, synthetic construct
  misc_feature 1..26: note = Synthetic: PIK3CA forward primer
  source 1..26: mol_type = other DNA
agtacctcatggattagaagatttgc

SEQ ID NO: 1096 - DNA, 24 bp, synthetic construct
  misc_feature 1..24: note = Synthetic: PIK3CA reverse primer
  source 1..24: mol_type = other DNA
agaaggtttgactgccataaaaaa

SEQ ID NO: 1097 - DNA, 23 bp, synthetic construct
  misc_feature 1..23: note = Synthetic: PIK3CA forward primer
  source 1..23: mol_type = other DNA
cctccatcaacttcttcaagatg

SEQ ID NO: 1098 - DNA, 24 bp, synthetic construct
  misc_feature 1..24: note = Synthetic: PIK3CA reverse primer
  source 1..24: mol_type = other DNA
aggtcacaaagtcgtcttgtttca

SEQ ID NO: 1099 - DNA, 27 bp, synthetic construct
  misc_feature 1..27: note = Synthetic: PIK3CA forward primer
  source 1..27: mol_type = other DNA
cgtaagtgttactcaagaagcagaaag

SEQ ID NO: 1100 - DNA, 23 bp, synthetic construct
  misc_feature 1..23: note = Synthetic: PIK3CA reverse primer
  source 1..23: mol_type = other DNA
ggttgcctactggttcaattact

SEQ ID NO: 1101 - DNA, 23 bp, synthetic construct
  misc_feature 1..23: note = Synthetic: PIK3CA forward primer
  source 1..23: mol_type = other DNA
cttcggctttttcaacccttttt

SEQ ID NO: 1102 - DNA, 33 bp, synthetic construct
  misc_feature 1..33: note = Synthetic: PIK3CA reverse primer
  source 1..33: mol_type = other DNA
ggatattgtatcataccaatttctcgattgagg

SEQ ID NO: 1103 - DNA, 26 bp, synthetic construct
  misc_feature 1..26: note = Synthetic: PIK3CA forward primer
  source 1..26: mol_type = other DNA
ggagatgtgttacaaggcttatctag

SEQ ID NO: 1104 - DNA, 27 bp, synthetic construct
  misc_feature 1..27: note = Synthetic: PIK3CA reverse primer
  source 1..27: mol_type = other DNA
tctaaggctagggtctttcgaatgtat

SEQ ID NO: 1105 - DNA, 24 bp, synthetic construct
  misc_feature 1..24: note = Synthetic: PIK3CA forward primer
  source 1..24: mol_type = other DNA
gagcaagaggctttggagtatttc

SEQ ID NO: 1106 - DNA, 27 bp, synthetic construct
  misc_feature 1..27: note = Synthetic: PIK3CA reverse primer
  source 1..27: mol_type = other DNA
ggaagatccaatccatttttgttgtcc

SEQ ID NO: 1107 - DNA, 21 bp, synthetic construct
  misc_feature 1..21: note = Synthetic: PIK3CA forward primer
  source 1..21: mol_type = other DNA
atgcacatcatggtggctgga

SEQ ID NO: 1108 - DNA, 26 bp, synthetic construct
  misc_feature 1..26: note = Synthetic: PIK3CA reverse primer
  source 1..26: mol_type = other DNA
atccagagtgagctttcattttctca

SEQ ID NO: 1109 - DNA, 23 bp, synthetic construct
  misc_feature 1..23: note = Synthetic: PI3 forward primer
  source 1..23: mol_type = other DNA
tcaaaggtccagtctccactaag

SEQ ID NO: 1110 - DNA, 24 bp, synthetic construct
  misc_feature 1..24: note = Synthetic: PI3 reverse primer
  source 1..24: mol_type = other DNA
agtatctttcaagcagcggttagg

SEQ ID NO: 1111 - DNA, 19 bp, synthetic construct
  misc_feature 1..19: note = Synthetic: PI3 forward primer
  source 1..19: mol_type = other DNA
ggtgcgccatgttgaatcc

SEQ ID NO: 1112 - DNA, 19 bp, synthetic construct
  misc_feature 1..19: note = Synthetic: PI3 reverse primer
  source 1..19: mol_type = other DNA
atcccgcaagagccttcac

SEQ ID NO: 1113 - DNA, 17 bp, synthetic construct
  misc_feature 1..17: note = Synthetic: PHACTR3 forward primer
  source 1..17: mol_type = other DNA
tccggggccagctctcc

SEQ ID NO: 1114 - DNA, 17 bp, synthetic construct
  misc_feature 1..17: note = Synthetic: PHACTR3 reverse primer
  source 1..17: mol_type = other DNA
agcgccctgtgcagctc

SEQ ID NO: 1115 - DNA, 18 bp, synthetic construct
  misc_feature 1..18: note = Synthetic: PHACTR3 forward primer
  source 1..18: mol_type = other DNA
caagccgcgtcattgagg

SEQ ID NO: 1116 - DNA, 20 bp, synthetic construct
  misc_feature 1..20: note = Synthetic: PHACTR3 reverse primer
  source 1..20: mol_type = other DNA
ttctggcagcacaggtctcc

SEQ ID NO: 1117 - DNA, 23 bp, synthetic construct
  misc_feature 1..23: note = Synthetic: PEX7 forward primer
  source 1..23: mol_type = other DNA
gcacatcaggcagaaatcttgag

SEQ ID NO: 1118 - DNA, 23 bp, synthetic construct
  misc_feature 1..23: note = Synthetic: PEX7 reverse primer
  source 1..23: mol_type = other DNA
aaggacagcagcataggatagag

SEQ ID NO: 1119 - DNA, 29 bp, synthetic construct
  misc_feature 1..29: note = Synthetic: PEX5L forward primer
  source 1..29: mol_type = other DNA
ctagttgaggaacagttaaaagtgagaga

SEQ ID NO: 1120 - DNA, 23 bp, synthetic construct
  misc_feature 1..23: note = Synthetic: PEX5L reverse primer
  source 1..23: mol_type = other DNA
gtgaaaccaaatcggaagcaata

SEQ ID NO: 1121 - DNA, 24 bp, synthetic construct
  misc_feature 1..24: note = Synthetic: PEX5L forward primer
  source 1..24: mol_type = other DNA
gtattggatgttactggccttgct

SEQ ID NO: 1122 - DNA, 23 bp, synthetic construct
  misc_feature 1..23: note = Synthetic: PEX5L reverse primer
  source 1..23: mol_type = other DNA
gtccctccatcgatgactttctc

SEQ ID NO: 1123 - DNA, 22 bp, synthetic construct
  misc_feature 1..22: note = Synthetic: PEG3 forward primer
  source 1..22: mol_type = other DNA
accaagagctcgatgatctcct

SEQ ID NO: 1124 - DNA, 23 bp, synthetic construct
  misc_feature 1..23: note = Synthetic: PEG3 reverse primer
  source 1..23: mol_type = other DNA
agaccctgatcaaactccgaaac

SEQ ID NO: 1125 - DNA, 19 bp, synthetic construct
  misc_feature 1..19: note = Synthetic: PEG3 forward primer
  source 1..19: mol_type = other DNA
ccggctgcaaccaatcgag

SEQ ID NO: 1126 - DNA, 27 bp, synthetic construct
  misc_feature 1..27: note = Synthetic: PEG3 reverse primer
  source 1..27: mol_type = other DNA
ttcggaacctaatctatgtggaatttg

SEQ ID NO: 1127 - DNA, 25 bp, synthetic construct
  misc_feature 1..25: note = Synthetic: PDZRN4 forward primer
  source 1..25: mol_type = other DNA
gaaactaatgtgccactctcatttg

SEQ ID NO: 1128 - DNA, 27 bp, synthetic construct
  misc_feature 1..27: note = Synthetic: PDZRN4 reverse primer
  source 1..27: mol_type = other DNA
gattctcttacactcatcgttagacag

SEQ ID NO: 1129 - DNA, 22 bp, synthetic construct
  misc_feature 1..22: note = Synthetic: PDZRN4 forward primer
  source 1..22: mol_type = other DNA
aagatgtccagaatcgagaaga

SEQ ID NO: 1130 - DNA, 22 bp, synthetic construct
  misc_feature 1..22: note = Synthetic: PDZRN4 reverse primer
  source 1..22: mol_type = other DNA
atctctggccttgcaacaagca

SEQ ID NO: 1131 - DNA, 24 bp, synthetic construct
  misc_feature 1..24: note = Synthetic: PDZD2 forward primer
  source 1..24: mol_type = other DNA
ttttcggggactatggtgaaaagc

SEQ ID NO: 1132 - DNA, 19 bp, synthetic construct
  misc_feature 1..19: note = Synthetic: PDZD2 reverse primer
  source 1..19: mol_type = other DNA
agatgcagcccacatccag

SEQ ID NO: 1133 - DNA, 19 bp, synthetic construct
  misc_feature 1..19: note = Synthetic: PDZD2 forward primer
  source 1..19: mol_type = other DNA
ggggcaagaagaggaaaac

SEQ ID NO: 1134 - DNA, 22 bp, synthetic construct
  misc_feature 1..22: note = Synthetic: PDZD2 reverse primer
  source 1..22: mol_type = other DNA
tgttcttcctcagctctgtcac

SEQ ID NO: 1135 - DNA, 23 bp, synthetic construct
  misc_feature 1..23: note = Synthetic: PDYN forward primer
  source 1..23: mol_type = other DNA
agctcctcttggggtatttgcgc

SEQ ID NO: 1136 - DNA, 21 bp, synthetic construct
  misc_feature 1..21: note = Synthetic: PDYN reverse primer
  source 1..21: mol_type = other DNA
cacactctatctcgctgagga

SEQ ID NO: 1137 - DNA, 22 bp, synthetic construct
  misc_feature 1..22: note = Synthetic: PDYN forward primer
  source 1..22: mol_type = other DNA
agcgtttgacctgctccttggg

SEQ ID NO: 1138 - DNA, 20 bp, synthetic construct
  misc_feature 1..20: note = Synthetic: PDYN reverse primer
  source 1..20: mol_type = other DNA
gatggtgccatggagactgg

SEQ ID NO: 1139 - DNA, 19 bp, synthetic construct
  misc_feature 1..19: note = Synthetic: PDYN forward primer
  source 1..19: mol_type = other DNA
ctggcgccggagaaaaccg

SEQ ID NO: 1140 - DNA, 22 bp, synthetic construct
  misc_feature 1..22: note = Synthetic: PDYN reverse primer
  source 1..22: mol_type = other DNA
acctgtacaaacgctatggggg

SEQ ID NO: 1141 - DNA, 17 bp, synthetic construct
  misc_feature 1..17: note = Synthetic: PDYN forward primer
  source 1..17: mol_type = other DNA
aatgcgccgcaagaagc

SEQ ID NO: 1142 - DNA, 17 bp, synthetic construct
  misc_feature 1..17: note = Synthetic: PDYN reverse primer
  source 1..17: mol_type = other DNA
ggacggggatagcatgg

SEQ ID NO: 1143 - DNA, 26 bp, synthetic construct
  misc_feature 1..26: note = Synthetic: PDE3A forward primer
  source 1..26: mol_type = other DNA
accaatgaaaatgatcgtctactggt

SEQ ID NO: 1144 - DNA, 24 bp, synthetic construct
  misc_feature 1..24: note = Synthetic: PDE3A reverse primer
  source 1..24: mol_type = other DNA
gtccactgaagatggagttcttta

SEQ ID NO: 1145 - DNA, 24 bp, synthetic construct
  misc_feature 1..24: note = Synthetic: PDE3A forward primer
  source 1..24: mol_type = other DNA
gctgatatcaatggtccagctaaa

SEQ ID NO: 1146 - DNA, 29 bp, synthetic construct
  misc_feature 1..29: note = Synthetic: PDE3A reverse primer
  source 1..29: mol_type = other DNA
agtggtcagttacctgttcataaaattca

SEQ ID NO: 1147 - DNA, 27 bp, synthetic construct
  misc_feature 1..27: note = Synthetic: PCF11 forward primer
  source 1..27: mol_type = other DNA
ctgaaccaaaggagaatgtagaaaact

SEQ ID NO: 1148 - DNA, 30 bp, synthetic construct
  misc_feature 1..30: note = Synthetic: PCF11 reverse primer
  source 1..30: mol_type = other DNA
tcataccttttattttcttcccaaccagat

SEQ ID NO: 1149 - DNA, 23 bp, synthetic construct
  misc_feature 1..23: note = Synthetic: PCF11 forward primer
  source 1..23: mol_type = other DNA
caagtctgccaaaagatggaaat

SEQ ID NO: 1150 - DNA, 34 bp, synthetic construct
  misc_feature 1..34: note = Synthetic: PCF11 reverse primer
  source 1..34: mol_type = other DNA
aacatatacactactacacttgacttaaaatgtt

SEQ ID NO: 1151 - DNA, 21 bp, synthetic construct
  misc_feature 1..21: note = Synthetic: PCDHGB3 forward primer
  source 1..21: mol_type = other DNA
ggacctaatggccttgtctcc

SEQ ID NO: 1152 - DNA, 17 bp, synthetic construct
  misc_feature 1..17: note = Synthetic: PCDHGB3 reverse primer
  source 1..17: mol_type = other DNA
ctgcgcgaacaccaccc

SEQ ID NO: 1153 - DNA, 19 bp, synthetic construct
  misc_feature 1..19: note = Synthetic: PCDHGB3 forward primer
  source 1..19: mol_type = other DNA
gtcctacgtgtccgtgagc

SEQ ID NO: 1154 - DNA, 17 bp, synthetic construct
  misc_feature 1..17: note = Synthetic: PCDHGB3 reverse primer
  source 1..17: mol_type = other DNA
cgcgcaggctcacgttg

SEQ ID NO: 1155 - DNA, 22 bp, synthetic construct
  misc_feature 1..22: note = Synthetic: PCDHGB2 forward primer
  source 1..22: mol_type = other DNA
cgggagattttatcctacgtgt

SEQ ID NO: 1156 - DNA, 19 bp, synthetic construct
  misc_feature 1..19: note = Synthetic: PCDHGB2 reverse primer
  source 1..19: mol_type = other DNA
tgcagtgtgagctcgaagg

SEQ ID NO: 1157 - DNA, 19 bp, synthetic construct
  misc_feature 1..19: note = Synthetic: PCDHGA6 forward primer
  source 1..19: mol_type = other DNA
cctaccgcctgctcaaggc

SEQ ID NO: 1158 - DNA, 19 bp, synthetic construct
  misc_feature 1..19: note = Synthetic: PCDHGA6 reverse primer
  source 1..19: mol_type = other DNA
tgagcgcgtctctgtccag

SEQ ID NO: 1159 - DNA, 20 bp, synthetic construct
  misc_feature 1..20: note = Synthetic: PCDHGA6 forward primer
  source 1..20: mol_type = other DNA
tttctcagtgggcctgcaca

SEQ ID NO: 1160 - DNA, 18 bp, synthetic construct
  misc_feature 1..18: note = Synthetic: PCDHGA6 reverse primer
  source 1..18: mol_type = other DNA
gtgagcgtgacagtggcg

SEQ ID NO: 1161 - DNA, 22 bp, synthetic construct
  misc_feature 1..22: note = Synthetic: PCDHGA3 forward primer
  source 1..22: mol_type = other DNA
gtttccgaaatggcagaggact

SEQ ID NO: 1162 - DNA, 25 bp, synthetic construct
  misc_feature 1..25: note = Synthetic: PCDHGA3 reverse primer
  source 1..25: mol_type = other DNA
gaaggaacctttatctagctcctca

SEQ ID NO: 1163 - DNA, 20 bp, synthetic construct
  misc_feature 1..20: note = Synthetic: PCDHGA3 forward primer
  source 1..20: mol_type = other DNA
ccggtcagatccgctactcg

SEQ ID NO: 1164 - DNA, 20 bp, synthetic construct
  misc_feature 1..20: note = Synthetic: PCDHGA3 reverse primer
  source 1..20: mol_type = other DNA
ctagccccaggtcgttagcg

SEQ ID NO: 1165 - DNA, 28 bp, synthetic construct
  misc_feature 1..28: note = Synthetic: PCDHGA2 forward primer
  source 1..28: mol_type = other DNA
cactcagtagcaatgtatcattaagcct

SEQ ID NO: 1166 - DNA, 18 bp, synthetic construct
  misc_feature 1..18: note = Synthetic: PCDHGA2 reverse primer
  source 1..18: mol_type = other DNA
agtggaaccgtctgtggg

SEQ ID NO: 1167 - DNA, 21 bp, synthetic construct
  misc_feature 1..21: note = Synthetic: PCDHGA2 forward primer
  source 1..21: mol_type = other DNA
gagatcctgtaccctgccttc

SEQ ID NO: 1168 - DNA, 19 bp, synthetic construct
  misc_feature 1..19: note = Synthetic: PCDHGA2 reverse primer
  source 1..19: mol_type = other DNA
ccaccttggtcaccaggta

SEQ ID NO: 1169 - DNA, 27 bp, synthetic construct
  misc_feature 1..27: note = Synthetic: PCDHB4 forward primer
  source 1..27: mol_type = other DNA
tctcaataaatgaagtcacgggagaaa

SEQ ID NO: 1170 - DNA, 22 bp, synthetic construct
  misc_feature 1..22: note = Synthetic: PCDHB4 reverse primer
  source 1..22: mol_type = other DNA
ctccatctgtggcctcaatttc

SEQ ID NO: 1171 - DNA, 19 bp, synthetic construct
  misc_feature 1..19: note = Synthetic: PCDHA3 forward primer
  source 1..19: mol_type = other DNA
agcgtgtcggcctatgagc

SEQ ID NO: 1172 - DNA, 19 bp, synthetic construct
  misc_feature 1..19: note = Synthetic: PCDHA3 reverse primer
  source 1..19: mol_type = other DNA
accgtgtactcggactgcg

SEQ ID NO: 1173 - DNA, 17 bp, synthetic construct
  misc_feature 1..17: note = Synthetic: PCDHA3 forward primer
  source 1..17: mol_type = other DNA
gccgctggaccacgagg

SEQ ID NO: 1174 - DNA, 18 bp, synthetic construct
  misc_feature 1..18: note = Synthetic: PCDHA3 reverse primer
  source 1..18: mol_type = other DNA
cgaacacctgcagcgtca

SEQ ID NO: 1175 - DNA, 17 bp, synthetic construct
  misc_feature 1..17: note = Synthetic: PCDHA3 forward primer
  source 1..17: mol_type = other DNA
tctgggcagcaacgtga

SEQ ID NO: 1176 - DNA, 17 bp, synthetic construct
  misc_feature 1..17: note = Synthetic: PCDHA3 reverse primer
  source 1..17: mol_type = other DNA
cgcgttgtcgttctcgt

SEQ ID NO: 1177 - DNA, 20 bp, synthetic construct
  misc_feature 1..20: note = Synthetic: PCDHA2 forward primer
  source 1..20: mol_type = other DNA
gccacatcttcacggtgtca

SEQ ID NO: 1178 - DNA, 17 bp, synthetic construct
  misc_feature 1..17: note = Synthetic: PCDHA2 reverse primer
  source 1..17: mol_type = other DNA
ctccgcgtgcaccgaaa

SEQ ID NO: 1179 - DNA, 17 bp, synthetic construct
  misc_feature 1..17: note = Synthetic: PCDHA2 forward primer
  source 1..17: mol_type = other DNA
cgcgttgtcgagctacg

SEQ ID NO: 1180 - DNA, 20 bp, synthetic construct
  misc_feature 1..20: note = Synthetic: PCDHA2 reverse primer
  source 1..20: mol_type = other DNA
aactgcagcagctccacttc

SEQ ID NO: 1181 - DNA, 19 bp, synthetic construct
  misc_feature 1..19: note = Synthetic: PCDHA1 forward primer
  source 1..19: mol_type = other DNA
gcgctggtgtcctattcgc

SEQ ID NO: 1182 - DNA, 18 bp, synthetic construct
  misc_feature 1..18: note = Synthetic: PCDHA1 reverse primer
  source 1..18: mol_type = other DNA
tacaccttgccgctctcc

SEQ ID NO: 1183 - DNA, 19 bp, synthetic construct
  misc_feature 1..19: note = Synthetic: PCDHA1 forward primer
  source 1..19: mol_type = other DNA
cgctgtcgaactacgtgtc

SEQ ID NO: 1184 - DNA, 17 bp, synthetic construct
  misc_feature 1..17: note = Synthetic: PCDHA1 reverse primer
  source 1..17: mol_type = other DNA
gcgctcacctggaactg

SEQ ID NO: 1185 - DNA, 19 bp, synthetic construct
  misc_feature 1..19: note = Synthetic: PCDH19 forward primer
  source 1..19: mol_type = other DNA
cactgcacacgtccattga

SEQ ID NO: 1186 - DNA, 21 bp, synthetic construct
  misc_feature 1..21: note = Synthetic: PCDH19 reverse primer
  source 1..21: mol_type = other DNA
gtgagcttgtggaggtcagcg

SEQ ID NO: 1187 - DNA, 18 bp, synthetic construct
  misc_feature 1..18: note = Synthetic: PCDH17 forward primer
  source 1..18: mol_type = other DNA
catcgagccttgcacctc

SEQ ID NO: 1188 - DNA, 24 bp, synthetic construct
  misc_feature 1..24: note = Synthetic: PCDH17 reverse primer
  source 1..24: mol_type = other DNA
atattgactgtcagtgggcaagta

SEQ ID NO: 1189 - DNA, 18 bp, synthetic construct
  misc_feature 1..18: note = Synthetic: PCDH17 forward primer
  source 1..18: mol_type = other DNA
tggctgaagcaagcagtc

SEQ ID NO: 1190 - DNA, 24 bp, synthetic construct
  misc_feature 1..24: note = Synthetic: PCDH17 reverse primer
  source 1..24: mol_type = other DNA
ggtctcttggttgcttactaggtg

SEQ ID NO: 1191 - DNA, 24 bp, synthetic construct
  misc_feature 1..24: note = Synthetic: PCDH15 forward primer
  source 1..24: mol_type = other DNA
gattccaggatatagccttgataa

SEQ ID NO: 1192 - DNA, 22 bp, synthetic construct
  misc_feature 1..22: note = Synthetic: PCDH15 reverse primer
  source 1..22: mol_type = other DNA
catcctcttcctgcctttgccg

SEQ ID NO: 1193 - DNA, 32 bp, synthetic construct
  misc_feature 1..32: note = Synthetic: PCDH15 forward primer
  source 1..32: mol_type = other DNA
attgttttcatccagtatttcaatgtgtagac

SEQ ID NO: 1194 - DNA, 32 bp, synthetic construct
  misc_feature 1..32: note = Synthetic: PCDH15 reverse primer
  source 1..32: mol_type = other DNA
caaaaagatagcacgacatatactttctaaat

SEQ ID NO: 1195 - DNA, 26 bp, synthetic construct
  misc_feature 1..26: note = Synthetic: PCDH15 forward primer
  source 1..26: mol_type = other DNA
gctctttaccgaaaaggtgtaagttt

SEQ ID NO: 1196 - DNA, 21 bp, synthetic construct
  misc_feature 1..21: note = Synthetic: PCDH15 reverse primer
  source 1..21: mol_type = other DNA
acctcagtcttcaccgtcaca

SEQ ID NO: 1197 - DNA, 25 bp, synthetic construct
  misc_feature 1..25: note = Synthetic: PCDH15 forward primer
  source 1..25: mol_type = other DNA
aaggtgaggtagcgagtaataccag

SEQ ID NO: 1198 - DNA, 23 bp, synthetic construct
  misc_feature 1..23: note = Synthetic: PCDH15 reverse primer
  source 1..23: mol_type = other DNA
acccagagcttcacctttttctg

SEQ ID NO: 1199 - DNA, 24 bp, synthetic construct
  misc_feature 1..24: note = Synthetic: PCDH15 forward primer
  source 1..24: mol_type = other DNA
aaaagagaaaaaggagaaatgtca

SEQ ID NO: 1200 - DNA, 18 bp, synthetic construct
  misc_feature 1..18: note = Synthetic: PCDH15 reverse primer
  source 1..18: mol_type = other DNA
ctctccttctgcctgtcc

SEQ ID NO: 1201 - DNA, 24 bp, synthetic construct
  misc_feature 1..24: note = Synthetic: PCDH15 forward primer
  source 1..24: mol_type = other DNA
ggaggagaaggaggagaaatagga

SEQ ID NO: 1202 - DNA, 30 bp, synthetic construct
  misc_feature 1..30: note = Synthetic: PCDH15 reverse primer
  source 1..30: mol_type = other DNA
acctatttgtatgttacctattgaaaccga

SEQ ID NO: 1203 - DNA, 20 bp, synthetic construct
  misc_feature 1..20: note = Synthetic: PCDH15 forward primer
  source 1..20: mol_type = other DNA
aggcatcaagttggtcgtgc

SEQ ID NO: 1204 - DNA, 20 bp, synthetic construct
  misc_feature 1..20: note = Synthetic: PCDH15 reverse primer
  source 1..20: mol_type = other DNA
cctccaccacctccttctat

SEQ ID NO: 1205 - DNA, 19 bp, synthetic construct
  misc_feature 1..19: note = Synthetic: PCDH15 forward primer
  source 1..19: mol_type = other DNA
aaggaggtggagggcaagg

SEQ ID NO: 1206 - DNA, 19 bp, synthetic construct
  misc_feature 1..19: note = Synthetic: PCDH15 reverse primer
  source 1..19: mol_type = other DNA
ccaacaccacctcttctac

SEQ ID NO: 1207 - DNA, 23 bp, synthetic construct
  misc_feature 1..23: note = Synthetic: PCDH15 forward primer
  source 1..23: mol_type = other DNA
gaggaagaggagttggaaatgga

SEQ ID NO: 1208 - DNA, 23 bp, synthetic construct
  misc_feature 1..23: note = Synthetic: PCDH15 reverse primer
  source 1..23: mol_type = other DNA
tccactttccgtttcaacgtctg

SEQ ID NO: 1209 - DNA, 26 bp, synthetic construct
  misc_feature 1..26: note = Synthetic: PCDH15 forward primer
  source 1..26: mol_type = other DNA
ttctgtagtctcagactcactgaact

SEQ ID NO: 1210 - DNA, 23 bp, synthetic construct
  misc_feature 1..23: note = Synthetic: PCDH15 reverse primer
  source 1..23: mol_type = other DNA
aagcaacagaaagcactgtagaa

SEQ ID NO: 1211 - DNA, 23 bp, synthetic construct
  misc_feature 1..23: note = Synthetic: PCDH15 forward primer
  source 1..23: mol_type = other DNA
agtatagtcgctggaggattcct

SEQ ID NO: 1212 - DNA, 25 bp, synthetic construct
  misc_feature 1..25: note = Synthetic: PCDH15 reverse primer
  source 1..25: mol_type = other DNA
acgccttgaggaagaagataaagat

SEQ ID NO: 1213 - DNA, 23 bp, synthetic construct
  misc_feature 1..23: note = Synthetic: PCDH15 forward primer
  source 1..23: mol_type = other DNA
ctctttcctacccttgacttcct

SEQ ID NO: 1214 - DNA, 22 bp, synthetic construct
  misc_feature 1..22: note = Synthetic: PCDH15 reverse primer
  source 1..22: mol_type = other DNA
ctgaatcagaagaatcggaatc

SEQ ID NO: 1215 - DNA, 27 bp, synthetic construct
  misc_feature 1..27: note = Synthetic: PCDH15 forward primer
  source 1..27: mol_type = other DNA
tttccttgctttttctccttctgactc

SEQ ID NO: 1216 - DNA, 20 bp, synthetic construct
  misc_feature 1..20: note = Synthetic: PCDH15 reverse primer
  source 1..20: mol_type = other DNA
agaggaatctgagtcagaga

SEQ ID NO: 1217 - DNA, 22 bp, synthetic construct
  misc_feature 1..22: note = Synthetic: PCBP1 forward primer
  source 1..22: mol_type = other DNA
caccaatgccatctttaaggct

SEQ ID NO: 1218 - DNA, 17 bp, synthetic construct
  misc_feature 1..17: note = Synthetic: PCBP1 reverse primer
  source 1..17: mol_type = other DNA
caccaccagcctcaggg

SEQ ID NO: 1219 - DNA, 17 bp, synthetic construct
  misc_feature 1..17: note = Synthetic: PCBP1 forward primer
  source 1..17: mol_type = other DNA
agcaggcccccggtcac

SEQ ID NO: 1220 - DNA, 21 bp, synthetic construct
  misc_feature 1..21: note = Synthetic: PCBP1 reverse primer
  source 1..21: mol_type = other DNA
ttacacccgcctttcccaatc

SEQ ID NO: 1221 - DNA, 26 bp, synthetic construct
  misc_feature 1..26: note = Synthetic: PAX3 forward primer
  source 1..26: mol_type = other DNA
caagctcttcatatggtctagtctct

SEQ ID NO: 1222 - DNA, 20 bp, synthetic construct
  misc_feature 1..20: note = Synthetic: PAX3 reverse primer
  source 1..20: mol_type = other DNA
gactgattacgcgctctccc

SEQ ID NO: 1223 - DNA, 19 bp, synthetic construct
  misc_feature 1..19: note = Synthetic: PAX3 forward primer
  source 1..19: mol_type = other DNA
caccgtggtggtaggttcc

SEQ ID NO: 1224 - DNA, 22 bp, synthetic construct
  misc_feature 1..22: note = Synthetic: PAX3 reverse primer
  source 1..22: mol_type = other DNA
aatgggactcctgaccaaccac

SEQ ID NO: 1225 - DNA, 19 bp, synthetic construct
  misc_feature 1..19: note = Synthetic: PAX2 forward primer
  source 1..19: mol_type = other DNA
tcaccccttcccctttgtg

SEQ ID NO: 1226 - DNA, 18 bp, synthetic construct
  misc_feature 1..18: note = Synthetic: PAX2 reverse primer
  source 1..18: mol_type = other DNA
tagcttccctggccagtg

SEQ ID NO: 1227 - DNA, 18 bp, synthetic construct
  misc_feature 1..18: note = Synthetic: PAX2 forward primer
  source 1..18: mol_type = other DNA
gacatggcgagcaccact

SEQ ID NO: 1228 - DNA, 17 bp, synthetic construct
  misc_feature 1..17: note = Synthetic: PAX2 reverse primer
  source 1..17: mol_type = other DNA
ccccacctagattaggc

SEQ ID NO: 1229 - DNA, 22 bp, synthetic construct
  misc_feature 1..22: note = Synthetic: PAPPA2 forward primer
  source 1..22: mol_type = other DNA
tgattagccacagtcgctacca

SEQ ID NO: 1230 - DNA, 21 bp, synthetic construct
  misc_feature 1..21: note = Synthetic: PAPPA2 reverse primer
  source 1..21: mol_type = other DNA
atccacatacagggccatgtg

SEQ ID NO: 1231 - DNA, 21 bp, synthetic construct
  misc_feature 1..21: note = Synthetic: PAPPA2 forward primer
  source 1..21: mol_type = other DNA
gtggcagccacttacgatgga

SEQ ID NO: 1232 - DNA, 23 bp, synthetic construct
  misc_feature 1..23: note = Synthetic: PAPPA2 reverse primer
  source 1..23: mol_type = other DNA
agactggtctagactgctagcca

SEQ ID NO: 1233 - DNA, 17 bp, synthetic construct
  misc_feature 1..17: note = Synthetic: PAPPA2 forward primer
  source 1..17: mol_type = other DNA
gcgacaccgggttgtgc

SEQ ID NO: 1234 - DNA, 17 bp, synthetic construct
  misc_feature 1..17: note = Synthetic: PAPPA2 reverse primer
  source 1..17: mol_type = other DNA
caggcggcagtcacccc

SEQ ID NO: 1235 - DNA, 21 bp, synthetic construct
  misc_feature 1..21: note = Synthetic: PAPPA2 forward primer
  source 1..21: mol_type = other DNA
acccactcacaggctatgatg

SEQ ID NO: 1236 - DNA, 22 bp, synthetic construct
  misc_feature 1..22: note = Synthetic: PAPPA2 reverse primer
  source 1..22: mol_type = other DNA
gcatgttgttacactccacgtg

SEQ ID NO: 1237 - DNA, 19 bp, synthetic construct
  misc_feature 1..19: note = Synthetic: PAPPA2 forward primer
  source 1..19: mol_type = other DNA
tgtgaggtaccaggttctc

SEQ ID NO: 1238 - DNA, 21 bp, synthetic construct
  misc_feature 1..21: note = Synthetic: PAPPA2 reverse primer
  source 1..21: mol_type = other DNA
cgtgaacttcctgtgagaatg

SEQ ID NO: 1239 - DNA, 20 bp, synthetic construct
  misc_feature 1..20: note = Synthetic: PAPPA2 forward primer
  source 1..20: mol_type = other DNA
ccatttgccagtggtttgcc

SEQ ID NO: 1240 - DNA, 22 bp, synthetic construct
  misc_feature 1..22: note = Synthetic: PAPPA2 reverse primer
  source 1..22: mol_type = other DNA
aagccccatagtcatgctacca

SEQ ID NO: 1241 - DNA, 26 bp, synthetic construct
  misc_feature 1..26: note = Synthetic: PAPPA2 forward primer
  source 1..26: mol_type = other DNA
ctgattatcaatgtgacccatcacca

SEQ ID NO: 1242 - DNA, 22 bp, synthetic construct
  misc_feature 1..22: note = Synthetic: PAPPA2 reverse primer
  source 1..22: mol_type = other DNA
cttagagccacagctgagatgc

SEQ ID NO: 1243 - DNA, 24 bp, synthetic construct
  misc_feature 1..24: note = Synthetic: PAPPA2 forward primer
  source 1..24: mol_type = other DNA
tcagtgctgctgaatttctcatcc

SEQ ID NO: 1244 - DNA, 21 bp, synthetic construct
  misc_feature 1..21: note = Synthetic: PAPPA2 reverse primer
  source 1..21: mol_type = other DNA
ttactgggagccgaaagacca

SEQ ID NO: 1245 - DNA, 27 bp, synthetic construct
  misc_feature 1..27: note = Synthetic: PAPPA2 forward primer
  source 1..27: mol_type = other DNA
ggaaactactctgatacgccttttaat

SEQ ID NO: 1246 - DNA, 20 bp, synthetic construct
  misc_feature 1..20: note = Synthetic: PAPPA2 reverse primer
  source 1..20: mol_type = other DNA
tcacattctggtcccagtgc

SEQ ID NO: 1247 - DNA, 27 bp, synthetic construct
  misc_feature 1..27: note = Synthetic: PAPPA2 forward primer
  source 1..27: mol_type = other DNA
aggaaattctgctcacatgttcttctg

SEQ ID NO: 1248 - DNA, 27 bp, synthetic construct
  misc_feature 1..27: note = Synthetic: PAPPA2 reverse primer
  source 1..27: mol_type = other DNA
gaagtttgcatagttcaccaaagacgg

SEQ ID NO: 1249 - DNA, 23 bp, synthetic construct
  misc_feature 1..23: note = Synthetic: PAK7 forward primer
  source 1..23: mol_type = other DNA
ccggaggtccattttcttcactg

SEQ ID NO: 1250 - DNA, 24 bp, synthetic construct
  misc_feature 1..24: note = Synthetic: PAK7 reverse primer
  source 1..24: mol_type = other DNA
caaaatcggggaaggctcaaccgg

SEQ ID NO: 1251 - DNA, 19 bp, synthetic construct
  misc_feature 1..19: note = Synthetic: PAK7 forward primer
  source 1..19: mol_type = other DNA
tgtttctcggtggcgatgc

SEQ ID NO: 1252 - DNA, 22 bp, synthetic construct
  misc_feature 1..22: note = Synthetic: PAK7 reverse primer
  source 1..22: mol_type = other DNA
agggaatacttggccaacttta

SEQ ID NO: 1253 - DNA, 27 bp, synthetic construct
  misc_feature 1..27: note = Synthetic: OTOL1 forward primer
  source 1..27: mol_type = other DNA
actgggaagtttaactgctctattcct

SEQ ID NO: 1254 - DNA, 21 bp, synthetic construct
  misc_feature 1..21: note = Synthetic: OTOL1 reverse primer
  source 1..21: mol_type = other DNA
ttcttattctgggccaccaga

SEQ ID NO: 1255 - DNA, 18 bp, synthetic construct
  misc_feature 1..18: note = Synthetic: OTOL1 forward primer
  source 1..18: mol_type = other DNA
gacctgctcgaatcagtc

SEQ ID NO: 1256 - DNA, 23 bp, synthetic construct
  misc_feature 1..23: note = Synthetic: OTOL1 reverse primer
  source 1..23: mol_type = other DNA
gagtttctctggacttgaactgc

SEQ ID NO: 1257 - DNA, 19 bp, synthetic construct
  misc_feature 1..19: note = Synthetic: OR8U1 forward primer
  source 1..19: mol_type = other DNA
tccaggaatctgcattcaa

SEQ ID NO: 1258 - DNA, 21 bp, synthetic construct
  misc_feature 1..21: note = Synthetic: OR8U1 reverse primer
  source 1..21: mol_type = other DNA
ctgaggagaggcatgtcatca

SEQ ID NO: 1259 - DNA, 23 bp, synthetic construct
  misc_feature 1..23: note = Synthetic: OR8U1 forward primer
  source 1..23: mol_type = other DNA
tcctattgccactccaacattgt

SEQ ID NO: 1260 - DNA, 21 bp, synthetic construct
  misc_feature 1..21: note = Synthetic: OR8U1 reverse primer
  source 1..21: mol_type = other DNA
gcgagtgtctgagcaagttag

SEQ ID NO: 1261 - DNA, 22 bp, synthetic construct
  misc_feature 1..22: note = Synthetic: OR8U1 forward primer
  source 1..22: mol_type = other DNA
agatgcccctctttgtgctatt

SEQ ID NO: 1262 - DNA, 25 bp, synthetic construct
  misc_feature 1..25: note = Synthetic: OR8U1 reverse primer
  source 1..25: mol_type = other DNA
gaaatccacaaaagctaggttgcta

SEQ ID NO: 1263 - DNA, 21 bp, synthetic construct
  misc_feature 1..21: note = Synthetic: OR8U1 forward primer
  source 1..21: mol_type = other DNA
acaccaatgtacttctttctt

SEQ ID NO: 1264 - DNA, 25 bp, synthetic construct
  misc_feature 1..25: note = Synthetic: OR8U1 reverse primer
  source 1..25: mol_type = other DNA
aaattcccaagcattttgggtgtaa

SEQ ID NO: 1265 - DNA, 25 bp, synthetic construct
  misc_feature 1..25: note = Synthetic: OR8K3 forward primer
  source 1..25: mol_type = other DNA
cgatgtctctatcagaataggtttt

SEQ ID NO: 1266 - DNA, 24 bp, synthetic construct
  misc_feature 1..24: note = Synthetic: OR8K3 reverse primer
  source 1..24: mol_type = other DNA
gatatctgtgattcccgtaagaat

SEQ ID NO: 1267 - DNA, 26 bp, synthetic construct
  misc_feature 1..26: note = Synthetic: OR8K3 forward primer
  source 1..26: mol_type = other DNA
aacacaatctaacaacggtgaatgaa

SEQ ID NO: 1268 - DNA, 23 bp, synthetic construct
  misc_feature 1..23: note = Synthetic: OR8K3 reverse primer
  source 1..23: mol_type = other DNA
caaattgcccatcactgagatca

SEQ ID NO: 1269 - DNA, 30 bp, synthetic construct
  misc_feature 1..30: note = Synthetic: OR8K1 forward primer
  source 1..30: mol_type = other DNA
atagtgcacaaaaacacaatttcttacaat

SEQ ID NO: 1270 - DNA, 24 bp, synthetic construct
  misc_feature 1..24: note = Synthetic: OR8K1 reverse primer
  source 1..24: mol_type = other DNA
gatcataggccattgctgatagaa

SEQ ID NO: 1271 - DNA, 28 bp, synthetic construct
  misc_feature 1..28: note = Synthetic: OR8K1 forward primer
  source 1..28: mol_type = other DNA
gagattttcatcatctctgagctcttta

SEQ ID NO: 1272 - DNA, 24 bp, synthetic construct
  misc_feature 1..24: note = Synthetic: OR8K1 reverse primer
  source 1..24: mol_type = other DNA
gaggtttacagatggctacgtagc

SEQ ID NO: 1273 - DNA, 21 bp, synthetic construct
  misc_feature 1..21: note = Synthetic: OR8J3 forward primer
  source 1..21: mol_type = other DNA
ttggtttggggctgcaaatac

SEQ ID NO: 1274 - DNA, 19 bp, synthetic construct
  misc_feature 1..19: note = Synthetic: OR8J3 reverse primer
  source 1..19: mol_type = other DNA
ccttttccacctgcgcttc

SEQ ID NO: 1275 - DNA, 24 bp, synthetic construct
  misc_feature 1..24: note = Synthetic: OR8J3 forward primer
  source 1..24: mol_type = other DNA
ttgtcccatagaaaaccgtgactg

SEQ ID NO: 1276 - DNA, 34 bp, synthetic construct
  misc_feature 1..34: note = Synthetic: OR8J3 reverse primer
  source 1..34: mol_type = other DNA
gttctagtatcttatttcaatattgttttgtcca

SEQ ID NO: 1277 - DNA, 23 bp, synthetic construct
  misc_feature 1..23: note = Synthetic: OR8B8 forward primer
  source 1..23: mol_type = other DNA
accacgtagaagcctagaaacag

SEQ ID NO: 1278 - DNA, 23 bp, synthetic construct
  misc_feature 1..23: note = Synthetic: OR8B8 reverse primer
  source 1..23: mol_type = other DNA
attcctccttcgtgacacagttt

SEQ ID NO: 1279 - DNA, 21 bp, synthetic construct
  misc_feature 1..21: note = Synthetic: OR8B8 forward primer
  source 1..21: mol_type = other DNA
ttggtcagttaagcctgcgag

SEQ ID NO: 1280 - DNA, 23 bp, synthetic construct
  misc_feature 1..23: note = Synthetic: OR8B8 reverse primer
  source 1..23: mol_type = other DNA
tccccacagaatgccttaaatga

SEQ ID NO: 1281 - DNA, 27 bp, synthetic construct
  misc_feature 1..27: note = Synthetic: OR8B4 forward primer
  source 1..27: mol_type = other DNA
gacaagttgaagaggaaaaagtacatg

SEQ ID NO: 1282 - DNA, 20 bp, synthetic construct
  misc_feature 1..20: note = Synthetic: OR8B4 reverse primer
  source 1..20: mol_type = other DNA
gcaacttgggcttgatcacc

SEQ ID NO: 1283 - DNA, 24 bp, synthetic construct
  misc_feature 1..24: note = Synthetic: OR8B4 forward primer
  source 1..24: mol_type = other DNA
tgtgaaggctaggatttatcccaa

SEQ ID NO: 1284 - DNA, 27 bp, synthetic construct
  misc_feature 1..27: note = Synthetic: OR8B4 reverse primer
  source 1..27: mol_type = other DNA
ctccctcttttccttctattcttaggg

SEQ ID NO: 1285 - DNA, 21 bp, synthetic construct
  misc_feature 1..21: note = Synthetic: OR6N1 forward primer
  source 1..21: mol_type = other DNA
cacaaagtgttggggtcatga

SEQ ID NO: 1286 - DNA, 22 bp, synthetic construct
  misc_feature 1..22: note = Synthetic: OR6N1 reverse primer
  source 1..22: mol_type = other DNA
ctcctgacagctatggcctacg

SEQ ID NO: 1287 - DNA, 21 bp, synthetic construct
  misc_feature 1..21: note = Synthetic: OR6N1 forward primer
  source 1..21: mol_type = other DNA
gcagatggctaaatacctatc

SEQ ID NO: 1288 - DNA, 23 bp, synthetic construct
  misc_feature 1..23: note = Synthetic: OR6N1 reverse primer
  source 1..23: mol_type = other DNA
gtgtctcctgcagatctatttct

SEQ ID NO: 1289 - DNA, 26 bp, synthetic construct
  misc_feature 1..26: note = Synthetic: OR6K2 forward primer
  source 1..26: mol_type = other DNA
agagcgaaaagacaatgaagtgagag

SEQ ID NO: 1290 - DNA, 26 bp, synthetic construct
  misc_feature 1..26: note = Synthetic: OR6K2 reverse primer
  source 1..26: mol_type = other DNA
tggtattgtggctgtaattctacgta

SEQ ID NO: 1291 - DNA, 20 bp, synthetic construct
  misc_feature 1..20: note = Synthetic: OR6K2 forward primer
  source 1..20: mol_type = other DNA
cacgtggaaaatgctgtgcg

SEQ ID NO: 1292 - DNA, 25 bp, synthetic construct
  misc_feature 1..25: note = Synthetic: OR6K2 reverse primer
  source 1..25: mol_type = other DNA
gtgatgctcatcttcatgtcctacg

SEQ ID NO: 1293 - DNA, 23 bp, synthetic construct
  misc_feature 1..23: note = Synthetic: OR6K2 forward primer
  source 1..23: mol_type = other DNA
ccctggtcttacggaaaaaaata

SEQ ID NO: 1294 - DNA, 27 bp, synthetic construct
  misc_feature 1..27: note = Synthetic: OR6K2 reverse primer
  source 1..27: mol_type = other DNA
tcttcaaccccattatctatagcctga

SEQ ID NO: 1295 - DNA, 24 bp, synthetic construct
  misc_feature 1..24: note = Synthetic: OR6K2 forward primer
  source 1..24: mol_type = other DNA
ttcttttatttctttattcctcag

SEQ ID NO: 1296 - DNA, 22 bp, synthetic construct
  misc_feature 1..22: note = Synthetic: OR6K2 reverse primer
  source 1..22: mol_type = other DNA
gcctttgcagttttgtctccct

SEQ ID NO: 1297 - DNA, 23 bp, synthetic construct
  misc_feature 1..23: note = Synthetic: OR6F1 forward primer
  source 1..23: mol_type = other DNA
gtggacagctttgatcagatcca

SEQ ID NO: 1298 - DNA, 18 bp, synthetic construct
  misc_feature 1..18: note = Synthetic: OR6F1 reverse primer
  source 1..18: mol_type = other DNA
cctcgcatctcaccgtgg

SEQ ID NO: 1299 - DNA, 25 bp, synthetic construct
  misc_feature 1..25: note = Synthetic: OR6F1 forward primer
  source 1..25: mol_type = other DNA
aaactgtggacccataccaaatgag

SEQ ID NO: 1300 - DNA, 22 bp, synthetic construct
  misc_feature 1..22: note = Synthetic: OR6F1 reverse primer
  source 1..22: mol_type = other DNA
tcatcagcaccatcctcaggat

SEQ ID NO: 1301 - DNA, 27 bp, synthetic construct
  misc_feature 1..27: note = Synthetic: OR6F1 forward primer
  source 1..27: mol_type = other DNA
atctgttgtggtagaggagatttattt

SEQ ID NO: 1302 - DNA, 25 bp, synthetic construct
  misc_feature 1..25: note = Synthetic: OR6F1 reverse primer
  source 1..25: mol_type = other DNA
ccagttttaaaccccttcatctata

SEQ ID NO: 1303 - DNA, 22 bp, synthetic construct
  misc_feature 1..22: note = Synthetic: OR6F1 forward primer
  source 1..22: mol_type = other DNA
tcttacttccttattacgaagc

SEQ ID NO: 1304 - DNA, 18 bp, synthetic construct
  misc_feature 1..18: note = Synthetic: OR6F1 reverse primer
  source 1..18: mol_type = other DNA
acgtcctgaacactgtgg

SEQ ID NO: 1305 - DNA, 26 bp, synthetic construct
  misc_feature 1..26: note = Synthetic: OR5W2 forward primer
  source 1..26: mol_type = other DNA
caagggtgtaaaacaatgaggtcatt

SEQ ID NO: 1306 - DNA, 23 bp, synthetic construct
  misc_feature 1..23: note = Synthetic: OR5W2 reverse primer
  source 1..23: mol_type = other DNA
caattttccagggaactctgctc

SEQ ID NO: 1307 - DNA, 23 bp, synthetic construct
  misc_feature 1..23: note = Synthetic: OR5W2 forward primer
  source 1..23: mol_type = other DNA
aggaagaacttggccggaaatac

SEQ ID NO: 1308 - DNA, 21 bp, synthetic construct
  misc_feature 1..21: note = Synthetic: OR5W2 reverse primer
  source 1..21: mol_type = other DNA
gggaggttcaaagctctctct

SEQ ID NO: 1309 - DNA, 26 bp, synthetic construct
  misc_feature 1..26: note = Synthetic: OR5T3 forward primer
  source 1..26: mol_type = other DNA
tgattgtcctcatttcctgtgatttc

SEQ ID NO: 1310 - DNA, 23 bp, synthetic construct
  misc_feature 1..23: note = Synthetic: OR5T3 reverse primer
  source 1..23: mol_type = other DNA
gagagccacatgtagagaaggcc

SEQ ID NO: 1311 - DNA, 24 bp, synthetic construct
  misc_feature 1..24: note = Synthetic: OR5L1 forward primer
  source 1..24: mol_type = other DNA
tatggagtcacgttgttagccaac

SEQ ID NO: 1312 - DNA, 24 bp, synthetic construct
  misc_feature 1..24: note = Synthetic: OR5L1 reverse primer
  source 1..24: mol_type = other DNA
gtggctgaggaaaaagtacatggg

SEQ ID NO: 1313 - DNA, 18 bp, synthetic construct
  misc_feature 1..18: note = Synthetic: OR5L1 forward primer
  source 1..18: mol_type = other DNA
ctctcggctccacacccc

SEQ ID NO: 1314 - DNA, 30 bp, synthetic construct
  misc_feature 1..30: note = Synthetic: OR5L1 reverse primer
  source 1..30: mol_type = other DNA
caattattgaggagtagcagaaatctacag

SEQ ID NO: 1315 - DNA, 34 bp, synthetic construct
  misc_feature 1..34: note = Synthetic: OR5L1 forward primer
  source 1..34: mol_type = other DNA
agaataatttttaagtttcttttcctccaatctc

SEQ ID NO: 1316 - DNA, 25 bp, synthetic construct
  misc_feature 1..25: note = Synthetic: OR5L1 reverse primer
  source 1..25: mol_type = other DNA
ctctcaactcagggacatctgatag

SEQ ID NO: 1317 - DNA, 22 bp, synthetic construct
  misc_feature 1..22: note = Synthetic: OR5L1 forward primer
  source 1..22: mol_type = other DNA
cactgtggctgagttcattctc

SEQ ID NO: 1318 - DNA, 19 bp, synthetic construct
  misc_feature 1..19: note = Synthetic: OR5L1 reverse primer
  source 1..19: mol_type = other DNA
aacagcaggaagaggcaga

SEQ ID NO: 1319 - DNA, 21 bp, synthetic construct
  misc_feature 1..21: note = Synthetic: OR5L1 forward primer
  source 1..21: mol_type = other DNA
ggcttcttgctgctacttctg

SEQ ID NO: 1320 - DNA, 32 bp, synthetic construct
  misc_feature 1..32: note = Synthetic: OR5L1 reverse primer
  source 1..32: mol_type = other DNA
taatcacattagatctatagaaggggatccta

SEQ ID NO: 1321 - DNA, 27 bp, synthetic construct
  misc_feature 1..27: note = Synthetic: OR5L1 forward primer
  source 1..27: mol_type = other DNA
tgttctctgattcatttgtgcttagct

SEQ ID NO: 1322 - DNA, 28 bp, synthetic construct
  misc_feature 1..28: note = Synthetic: OR5L1 reverse primer
  source 1..28: mol_type = other DNA
tgatatcagagcaagcaagacttaagac

SEQ ID NO: 1323 - DNA, 24 bp, synthetic construct
  misc_feature 1..24: note = Synthetic: OR5I1 forward primer
  source 1..24: mol_type = other DNA
cctccaaggtatgacaagacaatc

SEQ ID NO: 1324 - DNA, 22 bp, synthetic construct
  misc_feature 1..22: note = Synthetic: OR5I1 reverse primer
  source 1..22: mol_type = other DNA
cgctatgtcgccatctgtaacc

SEQ ID NO: 1325 - DNA, 26 bp, synthetic construct
  misc_feature 1..26: note = Synthetic: OR5I1 forward primer
  source 1..26: mol_type = other DNA
tagacatcacaactgtgtacaataaa

SEQ ID NO: 1326 - DNA, 23 bp, synthetic construct
  misc_feature 1..23: note = Synthetic: OR5I1 reverse primer
  source 1..23: mol_type = other DNA
gtgccctgcagttttattttttc

SEQ ID NO: 1327 - DNA, 25 bp, synthetic construct
  misc_feature 1..25: note = Synthetic: OR5F1 forward primer
  source 1..25: mol_type = other DNA
gggaatcgatcctgattaagaggat

SEQ ID NO: 1328 - DNA, 23 bp, synthetic construct
  misc_feature 1..23: note = Synthetic: OR5F1 reverse primer
  source 1..23: mol_type = other DNA
cacgctggagctacagattatcc

SEQ ID NO: 1329 - DNA, 19 bp, synthetic construct
  misc_feature 1..19: note = Synthetic: OR5F1 forward primer
  source 1..19: mol_type = other DNA
accctgcagcaaaagcccc

SEQ ID NO: 1330 - DNA, 19 bp, synthetic construct
  misc_feature 1..19: note = Synthetic: OR5F1 reverse primer
  source 1..19: mol_type = other DNA
tggcgacaaccgaatgcat

SEQ ID NO: 1331 - DNA, 19 bp, synthetic construct
  misc_feature 1..19: note = Synthetic: OR5F1 forward primer
  source 1..19: mol_type = other DNA
gcgacatatggccgcatac

SEQ ID NO: 1332 - DNA, 23 bp, synthetic construct
  misc_feature 1..23: note = Synthetic: OR5F1 reverse primer
  source 1..23: mol_type = other DNA
ggctgcttcctacagatgtactt

SEQ ID NO: 1333 - DNA, 21 bp, synthetic construct
  misc_feature 1..21: note = Synthetic: OR5F1 forward primer
  source 1..21: mol_type = other DNA
caagcagagtccccacaatat

SEQ ID NO: 1334 - DNA, 21 bp, synthetic construct
  misc_feature 1..21: note = Synthetic: OR5F1 reverse primer
  source 1..21: mol_type = other DNA
ccccacttttcaagctctctt

SEQ ID NO: 1335 - DNA, 28 bp, synthetic construct
  misc_feature 1..28: note = Synthetic: OR5D18 forward primer
  source 1..28: mol_type = other DNA
atttcatttttaggatgcgtagtacaat

SEQ ID NO: 1336 - DNA, 21 bp, synthetic construct
  misc_feature 1..21: note = Synthetic: OR5D18 reverse primer
  source 1..21: mol_type = other DNA
gtgtagagcagagggttgcaa

SEQ ID NO: 1337 - DNA, 17 bp, synthetic construct
  misc_feature 1..17: note = Synthetic: OR5D18 forward primer
  source 1..17: mol_type = other DNA
ccgcttcgtggccattt

SEQ ID NO: 1338 - DNA, 19 bp, synthetic construct
  misc_feature 1..19: note = Synthetic: OR5D18 reverse primer
  source 1..19: mol_type = other DNA
gcagcacgcagagtttctg

SEQ ID NO: 1339 - DNA, 24 bp, synthetic construct
  misc_feature 1..24: note = Synthetic: OR5D18 forward primer
  source 1..24: mol_type = other DNA
gtctcatgttccttggaactgacg

SEQ ID NO: 1340 - DNA, 24 bp, synthetic construct
  misc_feature 1..24: note = Synthetic: OR5D18 reverse primer
  source 1..24: mol_type = other DNA
atcagagcaagaaagggagagtag

SEQ ID NO: 1341 - DNA, 24 bp, synthetic construct
  misc_feature 1..24: note = Synthetic: OR5D18 forward primer
  source 1..24: mol_type = other DNA
cttcttctgtgagttctcctcact

SEQ ID NO: 1342 - DNA, 25 bp, synthetic construct
  misc_feature 1..25: note = Synthetic: OR5D18 reverse primer
  source 1..25: mol_type = other DNA
tgatttcattaaaggtggcaagaaa

SEQ ID NO: 1343 - DNA, 22 bp, synthetic construct
  misc_feature 1..22: note = Synthetic: OR5D18 forward primer
  source 1..22: mol_type = other DNA
atcctcaagatgcgttcagtca

SEQ ID NO: 1344 - DNA, 22 bp, synthetic construct
  misc_feature 1..22: note = Synthetic: OR5D18 reverse primer
  source 1..22: mol_type = other DNA
aaggaagaggatggtgccatgg

SEQ ID NO: 1345 - DNA, 20 bp, synthetic construct
  misc_feature 1..20: note = Synthetic: OR5D18 forward primer
  source 1..20: mol_type = other DNA
gactgccatcaccatcttcc

SEQ ID NO: 1346 - DNA, 20 bp, synthetic construct
  misc_feature 1..20: note = Synthetic: OR5D18 reverse primer
  source 1..20: mol_type = other DNA
ggatcaccacggtgtaaaac

SEQ ID NO: 1347 - DNA, 27 bp, synthetic construct
  misc_feature 1..27: note = Synthetic: OR5D16 forward primer
  source 1..27: mol_type = other DNA
ttctgtgagttatcctccctgatatca

SEQ ID NO: 1348 - DNA, 26 bp, synthetic construct
  misc_feature 1..26: note = Synthetic: OR5D16 reverse primer
  source 1..26: mol_type = other DNA
tgtcagaatgatgagtagtgtgctta

SEQ ID NO: 1349 - DNA, 23 bp, synthetic construct
  misc_feature 1..23: note = Synthetic: OR5D16 forward primer
  source 1..23: mol_type = other DNA
ttgcttcttttcactgttgccac

SEQ ID NO: 1350 - DNA, 23 bp, synthetic construct
  misc_feature 1..23: note = Synthetic: OR5D16 reverse primer
  source 1..23: mol_type = other DNA
catcttcaaggtggtgacaatga

SEQ ID NO: 1351 - DNA, 24 bp, synthetic construct
  misc_feature 1..24: note = Synthetic: OR5D16 forward primer
  source 1..24: mol_type = other DNA
aaagtggcctctgtgttttacacc

SEQ ID NO: 1352 - DNA, 30 bp, synthetic construct
  misc_feature 1..30: note = Synthetic: OR5D16 reverse primer
  source 1..30: mol_type = other DNA
tccttaacatctttatttctcagactgtag

SEQ ID NO: 1353 - DNA, 19 bp, synthetic construct
  misc_feature 1..19: note = Synthetic: OR5D16 forward primer
  source 1..19: mol_type = other DNA
gtggtgatccccttgttga

SEQ ID NO: 1354 - DNA, 32 bp, synthetic construct
  misc_feature 1..32: note = Synthetic: OR5D16 reverse primer
  source 1..32: mol_type = other DNA
aaattaaatggataccaatgcctatgtttaat

SEQ ID NO: 1355 - DNA, 27 bp, synthetic construct
  misc_feature 1..27: note = Synthetic: OR5D14 forward primer
  source 1..27: mol_type = other DNA
ttgagaacttggtaatggcagataaaa

SEQ ID NO: 1356 - DNA, 20 bp, synthetic construct
  misc_feature 1..20: note = Synthetic: OR5D14 reverse primer
  source 1..20: mol_type = other DNA
cataggccatcactgccagc

SEQ ID NO: 1357 - DNA, 21 bp, synthetic construct
  misc_feature 1..21: note = Synthetic: OR5D14 forward primer
  source 1..21: mol_type = other DNA
ctgtggtgacagagtctttct

SEQ ID NO: 1358 - DNA, 24 bp, synthetic construct
  misc_feature 1..24: note = Synthetic: OR5D14 reverse primer
  source 1..24: mol_type = other DNA
cactgtataaagcagaggattgca

SEQ ID NO: 1359 - DNA, 28 bp, synthetic construct
  misc_feature 1..28: note = Synthetic: OR5D14 forward primer
  source 1..28: mol_type = other DNA
cttcttttgtgagtatactgctctcatc

SEQ ID NO: 1360 - DNA, 29 bp, synthetic construct
  misc_feature 1..29: note = Synthetic: OR5D14 reverse primer
  source 1..29: mol_type = other DNA
acaaaaatgaaaacataggaagtgaggat

SEQ ID NO: 1361 - DNA, 23 bp, synthetic construct
  misc_feature 1..23: note = Synthetic: OR5D14 forward primer
  source 1..23: mol_type = other DNA
gccaccttcaatgagatgtgtac

SEQ ID NO: 1362 - DNA, 26 bp, synthetic construct
  misc_feature 1..26: note = Synthetic: OR5D14 reverse primer
  source 1..26: mol_type = other DNA
cccactaacagaacggatttttagta

SEQ ID NO: 1363 - DNA, 17 bp, synthetic construct
  misc_feature 1..17: note = Synthetic: OR5D14 forward primer
  source 1..17: mol_type = other DNA
gcgccacaaagccttct

SEQ ID NO: 1364 - DNA, 24 bp, synthetic construct
  misc_feature 1..24: note = Synthetic: OR5D14 reverse primer
  source 1..24: mol_type = other DNA
tttttggagttgggtacacagtaa

SEQ ID NO: 1365 - DNA, 20 bp, synthetic construct
  misc_feature 1..20: note = Synthetic: OR5D14 forward primer
  source 1..20: mol_type = other DNA
ccatcttccatgggaccatc

SEQ ID NO: 1366 - DNA, 24 bp, synthetic construct
  misc_feature 1..24: note = Synthetic: OR5D14 reverse primer
  source 1..24: mol_type = other DNA
tggggttgacaactgtgtaaaata

SEQ ID NO: 1367 - DNA, 27 bp, synthetic construct
  misc_feature 1..27: note = Synthetic: OR5D13 forward primer
  source 1..27: mol_type = other DNA
ttcctatccagttctgcttttcaagaa

SEQ ID NO: 1368 - DNA, 26 bp, synthetic construct
  misc_feature 1..26: note = Synthetic: OR5D13 reverse primer
  source 1..26: mol_type = other DNA
tgggtattctgaaaaacccaagagaa

SEQ ID NO: 1369 - DNA, 20 bp, synthetic construct
  misc_feature 1..20: note = Synthetic: OR5D13 forward primer
  source 1..20: mol_type = other DNA
aaagcagcacacccactttt

SEQ ID NO: 1370 - DNA, 24 bp, synthetic construct
  misc_feature 1..24: note = Synthetic: OR5D13 reverse primer
  source 1..24: mol_type = other DNA
gtgactgtgtagacgaacaagaaa

SEQ ID NO: 1371 - DNA, 22 bp, synthetic construct
  misc_feature 1..22: note = Synthetic: OR5B12 forward primer
  source 1..22: mol_type = other DNA
gggagaggttactgaggaagaa

SEQ ID NO: 1372 - DNA, 21 bp, synthetic construct
  misc_feature 1..21: note = Synthetic: OR5B12 reverse primer
  source 1..21: mol_type = other DNA
tgggaacctggggatgattga

SEQ ID NO: 1373 - DNA, 24 bp, synthetic construct
  misc_feature 1..24: note = Synthetic: OR5B12 forward primer
  source 1..24: mol_type = other DNA
gacaggagtccagtagaatcaatt

SEQ ID NO: 1374 - DNA, 24 bp, synthetic construct
  misc_feature 1..24: note = Synthetic: OR5B12 reverse primer
  source 1..24: mol_type = other DNA
agatcccactcttcatagtcttcc

SEQ ID NO: 1375 - DNA, 28 bp, synthetic construct
  misc_feature 1..28: note = Synthetic: OR52J3 forward primer
  source 1..28: mol_type = other DNA
tctctatttgattatcccaccctctctc

SEQ ID NO: 1376 - DNA, 30 bp, synthetic construct
  misc_feature 1..30: note = Synthetic: OR52J3 reverse primer
  source 1..30: mol_type = other DNA
cccttagtaaaataacatggtaagagtctt

SEQ ID NO: 1377 - DNA, 20 bp, synthetic construct
  misc_feature 1..20: note = Synthetic: OR52J3 forward primer
  source 1..20: mol_type = other DNA
gagtgctctatgtttttact

SEQ ID NO: 1378 - DNA, 31 bp, synthetic construct
  misc_feature 1..31: note = Synthetic: OR52J3 reverse primer
  source 1..31: mol_type = other DNA
taaggcaagaacatatcggtctttatagaag

SEQ ID NO: 1379 - DNA, 20 bp, synthetic construct
  misc_feature 1..20: note = Synthetic: OR52B4 forward primer
  source 1..20: mol_type = other DNA
caacgatccagggagatgtc

SEQ ID NO: 1380 - DNA, 20 bp, synthetic construct
  misc_feature 1..20: note = Synthetic: OR52B4 reverse primer
  source 1..20: mol_type = other DNA
tggctggagcagacattgtc

SEQ ID NO: 1381 - DNA, 19 bp, synthetic construct
  misc_feature 1..19: note = Synthetic: OR52B4 forward primer
  source 1..19: mol_type = other DNA
ctgaggaatggtgcacgtg

SEQ ID NO: 1382 - DNA, 25 bp, synthetic construct
  misc_feature 1..25: note = Synthetic: OR52B4 reverse primer
  source 1..25: mol_type = other DNA
aacagcctgctcatcttcattatcc

SEQ ID NO: 1383 - DNA, 24 bp, synthetic construct
  misc_feature 1..24: note = Synthetic: OR52A5 forward primer
  source 1..24: mol_type = other DNA
caaatgaaaccagaagatgcctaa

SEQ ID NO: 1384 - DNA, 24 bp, synthetic construct
  misc_feature 1..24: note = Synthetic: OR52A5 reverse primer
  source 1..24: mol_type = other DNA
cagcctccatatacccatgtacat

SEQ ID NO: 1385 - DNA, 18 bp, synthetic construct
  misc_feature 1..18: note = Synthetic: OR51S1 forward primer
  source 1..18: mol_type = other DNA
cagcagtgtgggcatcag

SEQ ID NO: 1386 - DNA, 17 bp, synthetic construct
  misc_feature 1..17: note = Synthetic: OR51S1 reverse primer
  source 1..17: mol_type = other DNA
gcagcccgccctgcacc

SEQ ID NO: 1387 - DNA, 24 bp, synthetic construct
  misc_feature 1..24: note = Synthetic: OR51S1 forward primer
  source 1..24: mol_type = other DNA
caagaagaggaagaagtgcattgg

SEQ ID NO: 1388 - DNA, 20 bp, synthetic construct
  misc_feature 1..20: note = Synthetic: OR51S1 reverse primer
  source 1..20: mol_type = other DNA
tggacattgcccctcattgc

SEQ ID NO: 1389 - DNA, 25 bp, synthetic construct
  misc_feature 1..25: note = Synthetic: OR51S1 forward primer
  source 1..25: mol_type = other DNA
acatctggatgcaagcaataagaat

SEQ ID NO: 1390 - DNA, 22 bp, synthetic construct
  misc_feature 1..22: note = Synthetic: OR51S1 reverse primer
  source 1..22: mol_type = other DNA
aaaatcagcctggccatttctt

SEQ ID NO: 1391 - DNA, 18 bp, synthetic construct
  misc_feature 1..18: note = Synthetic: OR51S1 forward primer
  source 1..18: mol_type = other DNA
atggcaggggcagatgga

SEQ ID NO: 1392 - DNA, 18 bp, synthetic construct
  misc_feature 1..18: note = Synthetic: OR51S1 reverse primer
  source 1..18: mol_type = other DNA
gcgctcctcaccaatggt

SEQ ID NO: 1393 - DNA, 21 bp, synthetic construct
  misc_feature 1..21: note = Synthetic: OR51Q1 forward primer
  source 1..21: mol_type = other DNA
catgggcaataccaccatcct

SEQ ID NO: 1394 - DNA, 22 bp, synthetic construct
  misc_feature 1..22: note = Synthetic: OR51Q1 reverse primer
  source 1..22: mol_type = other DNA
tgaaccagagaagctgcatgac

SEQ ID NO: 1395 - DNA, 20 bp, synthetic construct
  misc_feature 1..20: note = Synthetic: OR51Q1 forward primer
  source 1..20: mol_type = other DNA
ctcaccctcaccaccctacc

SEQ ID NO: 1396 - DNA, 22 bp, synthetic construct
  misc_feature 1..22: note = Synthetic: OR51Q1 reverse primer
  source 1..22: mol_type = other DNA
aaacaggcctcagagctgattc

SEQ ID NO: 1397 - DNA, 20 bp, synthetic construct
  misc_feature 1..20: note = Synthetic: OR51B5 forward primer
  source 1..20: mol_type = other DNA
tccagccagaggactcccag

SEQ ID NO: 1398 - DNA, 21 bp, synthetic construct
  misc_feature 1..21: note = Synthetic: OR51B5 reverse primer
  source 1..21: mol_type = other DNA
caccctccttcttctcattaa

SEQ ID NO: 1399 - DNA, 26 bp, synthetic construct
  misc_feature 1..26: note = Synthetic: OR51B5 forward primer
  source 1..26: mol_type = other DNA
agaagtacatgggctcatgaagattg

SEQ ID NO: 1400 - DNA, 27 bp, synthetic construct
  misc_feature 1..27: note = Synthetic: OR51B5 reverse primer
  source 1..27: mol_type = other DNA
tcatcactggatttccgtatttttctt

SEQ ID NO: 1401 - DNA, 22 bp, synthetic construct
  misc_feature 1..22: note = Synthetic: OR51B2 forward primer
  source 1..22: mol_type = other DNA
gcagaaagcacgtgtgataaca

SEQ ID NO: 1402 - DNA, 24 bp, synthetic construct
  misc_feature 1..24: note = Synthetic: OR51B2 reverse primer
  source 1..24: mol_type = other DNA
gggagtgtttctaaggggttttgt

SEQ ID NO: 1403 - DNA, 23 bp, synthetic construct
  misc_feature 1..23: note = Synthetic: OR51B2 forward primer
  source 1..23: mol_type = other DNA
cgcaaaattacaggcaggatgga

SEQ ID NO: 1404 - DNA, 27 bp, synthetic construct
  misc_feature 1..27: note = Synthetic: OR51B2 reverse primer
  source 1..27: mol_type = other DNA
ccaatactagagtcatagcgttaggag

SEQ ID NO: 1405 - DNA, 27 bp, synthetic construct
  misc_feature 1..27: note = Synthetic: OR4K2 forward primer
  source 1..27: mol_type = other DNA
ctctcctatgtatttcctgcttaccaa

SEQ ID NO: 1406 - DNA, 26 bp, synthetic construct
  misc_feature 1..26: note = Synthetic: OR4K2 reverse primer
  source 1..26: mol_type = other DNA
gatggttttgtgacctgttaggtaat

SEQ ID NO: 1407 - DNA, 22 bp, synthetic construct
  misc_feature 1..22: note = Synthetic: OR4D5 forward primer
  source 1..22: mol_type = other DNA
tttcctttggtggatgcctgac

SEQ ID NO: 1408 - DNA, 17 bp, synthetic construct
  misc_feature 1..17: note = Synthetic: OR4D5 reverse primer
  source 1..17: mol_type = other DNA
agtgcaggggctgggaa

SEQ ID NO: 1409 - DNA, 21 bp, synthetic construct
  misc_feature 1..21: note = Synthetic: OR4D5 forward primer
  source 1..21: mol_type = other DNA
tgactgtcatggcgtatgacc

SEQ ID NO: 1410 - DNA, 22 bp, synthetic construct
  misc_feature 1..22: note = Synthetic: OR4D5 reverse primer
  source 1..22: mol_type = other DNA
gtgcacagacagtctgattcat

SEQ ID NO: 1411 - DNA, 21 bp, synthetic construct
  misc_feature 1..21: note = Synthetic: OR4C6 forward primer
  source 1..21: mol_type = other DNA
tctgtaagcccctgcactaca

SEQ ID NO: 1412 - DNA, 24 bp, synthetic construct
  misc_feature 1..24: note = Synthetic: OR4C6 reverse primer
  source 1..24: mol_type = other DNA
agaagttgtatcattgcgtgcata

SEQ ID NO: 1413 - DNA, 20 bp, synthetic construct
  misc_feature 1..20: note = Synthetic: OR4C6 forward primer
  source 1..20: mol_type = other DNA
gtgtgctgcctaatggtagg

SEQ ID NO: 1414 - DNA, 25 bp, synthetic construct
  misc_feature 1..25: note = Synthetic: OR4C6 reverse primer
  source 1..25: mol_type = other DNA
accacagaagggtatttgatacatg

SEQ ID NO: 1415 - DNA, 22 bp, synthetic construct
  misc_feature 1..22: note = Synthetic: OR4C6 forward primer
  source 1..22: mol_type = other DNA
ctcaacagtgggatgatgtgtg

SEQ ID NO: 1416 - DNA, 19 bp, synthetic construct
  misc_feature 1..19: note = Synthetic: OR4C6 reverse primer
  source 1..19: mol_type = other DNA
tttgtgccgccctttagag

SEQ ID NO: 1417 - DNA, 21 bp, synthetic construct
  misc_feature 1..21: note = Synthetic: OR4C6 forward primer
  source 1..21: mol_type = other DNA
gtcatcctatgctccctgaag

SEQ ID NO: 1418 - DNA, 25 bp, synthetic construct
  misc_feature 1..25: note = Synthetic: OR4C6 reverse primer
  source 1..25: mol_type = other DNA
aaagaacaatacaaccaccgtgagg

SEQ ID NO: 1419 - DNA, 22 bp, synthetic construct
  misc_feature 1..22: note = Synthetic: OR4C16 forward primer
  source 1..22: mol_type = other DNA
aggcacttaagaacccaatgtt

SEQ ID NO: 1420 - DNA, 20 bp, synthetic construct
  misc_feature 1..20: note = Synthetic: OR4C16 reverse primer
  source 1..20: mol_type = other DNA
gcactcgctgaaggagatag

SEQ ID NO: 1421 - DNA, 23 bp, synthetic construct
  misc_feature 1..23: note = Synthetic: OR4C16 forward primer
  source 1..23: mol_type = other DNA
tggatgcccttttgaagaagaca

SEQ ID NO: 1422 - DNA, 24 bp, synthetic construct
  misc_feature 1..24: note = Synthetic: OR4C16 reverse primer
  source 1..24: mol_type = other DNA
gtgaggatgaggatgaagatctcc

SEQ ID NO: 1423 - DNA, 25 bp, synthetic construct
  misc_feature 1..25: note = Synthetic: OR4C16 forward primer
  source 1..25: mol_type = other DNA
gtgcatgatccaagtcttttcatcc

SEQ ID NO: 1424 - DNA, 22 bp, synthetic construct
  misc_feature 1..22: note = Synthetic: OR4C16 reverse primer
  source 1..22: mol_type = other DNA
gatgtccacatagcggtcaaca

SEQ ID NO: 1425 - DNA, 21 bp, synthetic construct
  misc_feature 1..21: note = Synthetic: OR4C16 forward primer
  source 1..21: mol_type = other DNA
ctgtaagcccctgcactacat

SEQ ID NO: 1426 - DNA, 18 bp, synthetic construct
  misc_feature 1..18: note = Synthetic: OR4C16 reverse primer
  source 1..18: mol_type = other DNA
acaggatcccacccaggc

SEQ ID NO: 1427 - DNA, 21 bp, synthetic construct
  misc_feature 1..21: note = Synthetic: OR4C16 forward primer
  source 1..21: mol_type = other DNA
gtgggtctgtggtgttttgat

SEQ ID NO: 1428 - DNA, 21 bp, synthetic construct
  misc_feature 1..21: note = Synthetic: OR4C16 reverse primer
  source 1..21: mol_type = other DNA
ggcaaactcagggcaagaaaa

SEQ ID NO: 1429 - DNA, 19 bp, synthetic construct
  misc_feature 1..19: note = Synthetic: OR4C15 forward primer
  source 1..19: mol_type = other DNA
tggggtggaggtgattgtc

SEQ ID NO: 1430 - DNA, 25 bp, synthetic construct
  misc_feature 1..25: note = Synthetic: OR4C15 reverse primer
  source 1..25: mol_type = other DNA
agcctcctgttcatgatagaagagt

SEQ ID NO: 1431 - DNA, 19 bp, synthetic construct
  misc_feature 1..19: note = Synthetic: OR4C15 forward primer
  source 1..19: mol_type = other DNA
ccatttgcaagcccttgca

SEQ ID NO: 1432 - DNA, 18 bp, synthetic construct
  misc_feature 1..18: note = Synthetic: OR4C15 reverse primer
  source 1..18: mol_type = other DNA
aggctacccccatcagaa

SEQ ID NO: 1433 - DNA, 25 bp, synthetic construct
  misc_feature 1..25: note = Synthetic: OR4C15 forward primer
  source 1..25: mol_type = other DNA
ctccttgttgcttgtctcctatgct

SEQ ID NO: 1434 - DNA, 28 bp, synthetic construct
  misc_feature 1..28: note = Synthetic: OR4C15 reverse primer
  source 1..28: mol_type = other DNA
tacaaatatgcatgggacaaagaacaaa

SEQ ID NO: 1435 - DNA, 22 bp, synthetic construct
  misc_feature 1..22: note = Synthetic: OR4C15 forward primer
  source 1..22: mol_type = other DNA
acctgtggatctcacattgctg

SEQ ID NO: 1436 - DNA, 20 bp, synthetic construct
  misc_feature 1..20: note = Synthetic: OR4C15 reverse primer
  source 1..20: mol_type = other DNA
gccattttgtcaagggaaaa

SEQ ID NO: 1437 - DNA, 20 bp, synthetic construct
  misc_feature 1..20: note = Synthetic: OR4C15 forward primer
  source 1..20: mol_type = other DNA
tatacacgacctccatctgc

SEQ ID NO: 1438 - DNA, 27 bp, synthetic construct
  misc_feature 1..27: note = Synthetic: OR4C15 reverse primer
  source 1..27: mol_type = other DNA
aggattgagcaagggatttaagatgat

SEQ ID NO: 1439 - DNA, 34 bp, synthetic construct
  misc_feature 1..34: note = Synthetic: OR4C15 forward primer
  source 1..34: mol_type = other DNA
tctatcacaattctgtctgatatttcagtactac

SEQ ID NO: 1440 - DNA, 30 bp, synthetic construct
  misc_feature 1..30: note = Synthetic: OR4C15 reverse primer
  source 1..30: mol_type = other DNA
ttcagatcaatttgtggtatcatagtcatt

SEQ ID NO: 1441 - DNA, 29 bp, synthetic construct
  misc_feature 1..29: note = Synthetic: OR4C15 forward primer
  source 1..29: mol_type = other DNA
taattttgcacttggatgtaccaacttgt

SEQ ID NO: 1442 - DNA, 27 bp, synthetic construct
  misc_feature 1..27: note = Synthetic: OR4C15 reverse primer
  source 1..27: mol_type = other DNA
atgtttcccaaggaaaagatgaaagct

SEQ ID NO: 1443 - DNA, 28 bp, synthetic construct
  misc_feature 1..28: note = Synthetic: OR4C15 forward primer
  source 1..28: mol_type = other DNA
tctgaagcaaattttcctttgtcctaat

SEQ ID NO: 1444 - DNA, 27 bp, synthetic construct
  misc_feature 1..27: note = Synthetic: OR4C15 reverse primer
  source 1..27: mol_type = other DNA
caaactcagttacaaagctttggtttt

SEQ ID NO: 1445 - DNA, 25 bp, synthetic construct
  misc_feature 1..25: note = Synthetic: OR4A16 forward primer
  source 1..25: mol_type = other DNA
gttgccaatggtggaataatttgta

SEQ ID NO: 1446 - DNA, 19 bp, synthetic construct
  misc_feature 1..19: note = Synthetic: OR4A16 reverse primer
  source 1..19: mol_type = other DNA
aggtaggcagggctttatg

SEQ ID NO: 1447 - DNA, 29 bp, synthetic construct
  misc_feature 1..29: note = Synthetic: OR4A16 forward primer
  source 1..29: mol_type = other DNA
cttccttaaaacttacagtcaggaagaga

SEQ ID NO: 1448 - DNA, 26 bp, synthetic construct
  misc_feature 1..26: note = Synthetic: OR4A16 reverse primer
  source 1..26: mol_type = other DNA
agttggaaacgggtctaacatacata

SEQ ID NO: 1449 - DNA, 22 bp, synthetic construct
  misc_feature 1..22: note = Synthetic: OR2T4 forward primer
  source 1..22: mol_type = other DNA
gagtgtgggatgcagatgttct

SEQ ID NO: 1450 - DNA, 22 bp, synthetic construct
  misc_feature 1..22: note = Synthetic: OR2T4 reverse primer
  source 1..22: mol_type = other DNA
accctatggttcatgaggacag

SEQ ID NO: 1451 - DNA, 19 bp, synthetic construct
  misc_feature 1..19: note = Synthetic: OR2T4 forward primer
  source 1..19: mol_type = other DNA
ctgccatcctctccgttac

SEQ ID NO: 1452 - DNA, 19 bp, synthetic construct
  misc_feature 1..19: note = Synthetic: OR2T4 reverse primer
  source 1..19: mol_type = other DNA
gaaccagcagcctgatgac

SEQ ID NO: 1453 - DNA, 18 bp, synthetic construct
  misc_feature 1..18: note = Synthetic: OR2T4 forward primer
  source 1..18: mol_type = other DNA
ctcagtggatggcttcac

SEQ ID NO: 1454 - DNA, 25 bp, synthetic construct
  misc_feature 1..25: note = Synthetic: OR2T4 reverse primer
  source 1..25: mol_type = other DNA
gaaatgatgaatctcccgggatcca

SEQ ID NO: 1455 - DNA, 19 bp, synthetic construct
  misc_feature 1..19: note = Synthetic: OR2T4 forward primer
  source 1..19: mol_type = other DNA
gaccttccccttccgtgga

SEQ ID NO: 1456 - DNA, 27 bp, synthetic construct
  misc_feature 1..27: note = Synthetic: OR2T4 reverse primer
  source 1..27: mol_type = other DNA
agattcaatacagcaggaacttcacag

SEQ ID NO: 1457 - DNA, 23 bp, synthetic construct
  misc_feature 1..23: note = Synthetic: OR2T1 forward primer
  source 1..23: mol_type = other DNA
catgctgccacattcttaccaca

SEQ ID NO: 1458 - DNA, 21 bp, synthetic construct
  misc_feature 1..21: note = Synthetic: OR2T1 reverse primer
  source 1..21: mol_type = other DNA
agatgagggggttcagcatgg

SEQ ID NO: 1459 - DNA, 21 bp, synthetic construct
  misc_feature 1..21: note = Synthetic: OR2T1 forward primer
  source 1..21: mol_type = other DNA
tctgtgttttacaccattctc

SEQ ID NO: 1460 - DNA, 25 bp, synthetic construct
  misc_feature 1..25: note = Synthetic: OR2T1 reverse primer
  source 1..25: mol_type = other DNA
ccagtcacatccttgtttctaaggc

SEQ ID NO: 1461 - DNA, 27 bp, synthetic construct
  misc_feature 1..27: note = Synthetic: OR2M7 forward primer
  source 1..27: mol_type = other DNA
ggtctcatgagattggtgtatcttaga

SEQ ID NO: 1462 - DNA, 22 bp, synthetic construct
  misc_feature 1..22: note = Synthetic: OR2M7 reverse primer
  source 1..22: mol_type = other DNA
tatatcattgcttggctccgaa

SEQ ID NO: 1463 - DNA, 24 bp, synthetic construct
  misc_feature 1..24: note = Synthetic: OR2M7 forward primer
  source 1..24: mol_type = other DNA
ggtcataagacataacagccaaca

SEQ ID NO: 1464 - DNA, 23 bp, synthetic construct
  misc_feature 1..23: note = Synthetic: OR2M7 reverse primer
  source 1..23: mol_type = other DNA
ctggcagcaagtccatttctatg

SEQ ID NO: 1465 - DNA, 21 bp, synthetic construct
  misc_feature 1..21: note = Synthetic: OR2M5 forward primer
  source 1..21: mol_type = other DNA
ggacaagctggtgtctgtatt

SEQ ID NO: 1466 - DNA, 20 bp, synthetic construct
  misc_feature 1..20: note = Synthetic: OR2M5 reverse primer
  source 1..20: mol_type = other DNA
tgctctggtcacctccttgt

SEQ ID NO: 1467 - DNA, 22 bp, synthetic construct
  misc_feature 1..22: note = Synthetic: OR2M5 forward primer
  source 1..22: mol_type = other DNA
cctcactcccatgctgaatccc

SEQ ID NO: 1468 - DNA, 22 bp, synthetic construct
  misc_feature 1..22: note = Synthetic: OR2M5 reverse primer
  source 1..22: mol_type = other DNA
cacacttgccctttcctaacac

SEQ ID NO: 1469 - DNA, 23 bp, synthetic construct
  misc_feature 1..23: note = Synthetic: OR2M4 forward primer
  source 1..23: mol_type = other DNA
tgggaaaaccagaccttcaactc

SEQ ID NO: 1470 - DNA, 20 bp, synthetic construct
  misc_feature 1..20: note = Synthetic: OR2M4 reverse primer
  source 1..20: mol_type = other DNA
gagaagatgcccaggaccag

SEQ ID NO: 1471 - DNA, 22 bp, synthetic construct
  misc_feature 1..22: note = Synthetic: OR2M4 forward primer
  source 1..22: mol_type = other DNA
acccacaccttccttttttctc

SEQ ID NO: 1472 - DNA, 27 bp, synthetic construct
  misc_feature 1..27: note = Synthetic: OR2M4 reverse primer
  source 1..27: mol_type = other DNA
gagctgtttctctatgtagatgaggag

SEQ ID NO: 1473 - DNA, 28 bp, synthetic construct
  misc_feature 1..28: note = Synthetic: OR2M4 forward primer
  source 1..28: mol_type = other DNA
ggtaatgctaatctttccagtttcagtt

SEQ ID NO: 1474 - DNA, 22 bp, synthetic construct
  misc_feature 1..22: note = Synthetic: OR2M4 reverse primer
  source 1..22: mol_type = other DNA
agtagagtccgaccacagacag

SEQ ID NO: 1475 - DNA, 20 bp, synthetic construct
  misc_feature 1..20: note = Synthetic: OR2M4 forward primer
  source 1..20: mol_type = other DNA
cactacctgctcctcccacc

SEQ ID NO: 1476 - DNA, 24 bp, synthetic construct
  misc_feature 1..24: note = Synthetic: OR2M4 reverse primer
  source 1..24: mol_type = other DNA
tggtctggcgtatgtttagaagct

SEQ ID NO: 1477 - DNA, 29 bp, synthetic construct
  misc_feature 1..29: note = Synthetic: OR2M3 forward primer
  source 1..29: mol_type = other DNA
gtaatgattgttttccctgttgcaatcat

SEQ ID NO: 1478 - DNA, 26 bp, synthetic construct
  misc_feature 1..26: note = Synthetic: OR2M3 reverse primer
  source 1..26: mol_type = other DNA
ggaacaagtagtaaaagctttgcgac

SEQ ID NO: 1479 - DNA, 22 bp, synthetic construct
  misc_feature 1..22: note = Synthetic: OR2M3 forward primer
  source 1..22: mol_type = other DNA
gctgtcattcacatgggatctg

SEQ ID NO: 1480 - DNA, 25 bp, synthetic construct
  misc_feature 1..25: note = Synthetic: OR2M3 reverse primer
  source 1..25: mol_type = other DNA
caaagctgctccatagtacattccc

SEQ ID NO: 1481 - DNA, 24 bp, synthetic construct
  misc_feature 1..24: note = Synthetic: OR2L13 forward primer
  source 1..24: mol_type = other DNA
cttttccctttcattggcatcact

SEQ ID NO: 1482 - DNA, 27 bp, synthetic construct
  misc_feature 1..27: note = Synthetic: OR2L13 reverse primer
  source 1..27: mol_type = other DNA
gttaaatgtgttgaaatggtggtgaag

SEQ ID NO: 1483 - DNA, 31 bp, synthetic construct
  misc_feature 1..31: note = Synthetic: OR2L13 forward primer
  source 1..31: mol_type = other DNA
agtgatcttttactatgcaccttttgtctac

SEQ ID NO: 1484 - DNA, 24 bp, synthetic construct
  misc_feature 1..24: note = Synthetic: OR2L13 reverse primer
  source 1..24: mol_type = other DNA
agaagactgccaggatcttgtctt

SEQ ID NO: 1485 - DNA, 19 bp, synthetic construct
  misc_feature 1..19: note = Synthetic: OR2L13 forward primer
  source 1..19: mol_type = other DNA
atctccgctcaccagctga

SEQ ID NO: 1486 - DNA, 20 bp, synthetic construct
  misc_feature 1..20: note = Synthetic: OR2L13 reverse primer
  source 1..20: mol_type = other DNA
gattgagcatgggggtaagg

SEQ ID NO: 1487 - DNA, 25 bp, synthetic construct
  misc_feature 1..25: note = Synthetic: OR2G6 forward primer
  source 1..25: mol_type = other DNA
agatccaaaaaccagggaaagtttg

SEQ ID NO: 1488 - DNA, 19 bp, synthetic construct
  misc_feature 1..19: note = Synthetic: OR2G6 reverse primer
  source 1..19: mol_type = other DNA
ctcaaggcccctttcacat

SEQ ID NO: 1489 - DNA, 27 bp, synthetic construct
  misc_feature 1..27: note = Synthetic: OR2G6 forward primer
  source 1..27: mol_type = other DNA
ccacttttaaaccccattatctacact

SEQ ID NO: 1490 - DNA, 21 bp, synthetic construct
  misc_feature 1..21: note = Synthetic: OR2G6 reverse primer
  source 1..21: mol_type = other DNA
cagcagcactacccagtatca

SEQ ID NO: 1491 - DNA, 26 bp, synthetic construct
  misc_feature 1..26: note = Synthetic: OR2G2 forward primer
  source 1..26: mol_type = other DNA
gatgtatttcttcctttctcatctct

SEQ ID NO: 1492 - DNA, 21 bp, synthetic construct
  misc_feature 1..21: note = Synthetic: OR2G2 reverse primer
  source 1..21: mol_type = other DNA
ggttcccacaggtttaccagg

SEQ ID NO: 1493 - DNA, 21 bp, synthetic construct
  misc_feature 1..21: note = Synthetic: OR2G2 forward primer
  source 1..21: mol_type = other DNA
agcagtgttattccccagctc

SEQ ID NO: 1494 - DNA, 20 bp, synthetic construct
  misc_feature 1..20: note = Synthetic: OR2G2 reverse primer
  source 1..20: mol_type = other DNA
ccaaacagccaccataggcg

SEQ ID NO: 1495 - DNA, 19 bp, synthetic construct
  misc_feature 1..19: note = Synthetic: OR2G2 forward primer
  source 1..19: mol_type = other DNA
atccactgagtgcgtcctc

SEQ ID NO: 1496 - DNA, 18 bp, synthetic construct
  misc_feature 1..18: note = Synthetic: OR2G2 reverse primer
  source 1..18: mol_type = other DNA
ggagaggacggcagacag

SEQ ID NO: 1497 - DNA, 21 bp, synthetic construct
  misc_feature 1..21: note = Synthetic: OR2G2 forward primer
  source 1..21: mol_type = other DNA
gatgtcctgtgaccgctatgt

SEQ ID NO: 1498 - DNA, 26 bp, synthetic construct
  misc_feature 1..26: note = Synthetic: OR2G2 reverse primer
  source 1..26: mol_type = other DNA
catgcagagatggatatgcattaaga

SEQ ID NO: 1499 - DNA, 19 bp, synthetic construct
  misc_feature 1..19: note = Synthetic: OR2G2 forward primer
  source 1..19: mol_type = other DNA
agccaccaccctggtacag

SEQ ID NO: 1500 - DNA, 18 bp, synthetic construct
  misc_feature 1..18: note = Synthetic: OR2G2 reverse primer
  source 1..18: mol_type = other DNA
acacaagccagcttgatg

SEQ ID NO: 1501 - DNA, 23 bp, synthetic construct
  misc_feature 1..23: note = Synthetic: OR2G2 forward primer
  source 1..23: mol_type = other DNA
tggatcatttcatctgcgaggtc

SEQ ID NO: 1502 - DNA, 27 bp, synthetic construct
  misc_feature 1..27: note = Synthetic: OR2G2 reverse primer
  source 1..27: mol_type = other DNA
acaggcactataaggaaaaggatacta

SEQ ID NO: 1503 - DNA, 23 bp, synthetic construct
  misc_feature 1..23: note = Synthetic: OR13G1 forward primer
  source 1..23: mol_type = other DNA
gggaaacaaatggccacatagcg

SEQ ID NO: 1504 - DNA, 22 bp, synthetic construct
  misc_feature 1..22: note = Synthetic: OR13G1 reverse primer
  source 1..22: mol_type = other DNA
cccagctcttcttgttcacatg

SEQ ID NO: 1505 - DNA, 24 bp, synthetic construct
  misc_feature 1..24: note = Synthetic: OR10Z1 forward primer
  source 1..24: mol_type = other DNA
cttctctttgccttgttcctctct

SEQ ID NO: 1506 - DNA, 24 bp, synthetic construct
  misc_feature 1..24: note = Synthetic: OR10Z1 reverse primer
  source 1..24: mol_type = other DNA
aaggaaaggaagaggtacatgggg

SEQ ID NO: 1507 - DNA, 20 bp, synthetic construct
  misc_feature 1..20: note = Synthetic: OR10Z1 forward primer
  source 1..20: mol_type = other DNA
tggatagccatctgcacacc

SEQ ID NO: 1508 - DNA, 21 bp, synthetic construct
  misc_feature 1..21: note = Synthetic: OR10Z1 reverse primer
  source 1..21: mol_type = other DNA
tgcccaaagtgtagcaggtct

SEQ ID NO: 1509 - DNA, 23 bp, synthetic construct
  misc_feature 1..23: note = Synthetic: OR10R2 forward primer
  source 1..23: mol_type = other DNA
attaccaactgcctgctattggg

SEQ ID NO: 1510 - DNA, 23 bp, synthetic construct
  misc_feature 1..23: note = Synthetic: OR10R2 reverse primer
  source 1..23: mol_type = other DNA
agctcataagagtggggtaatgc

SEQ ID NO: 1511 - DNA, 21 bp, synthetic construct
  misc_feature 1..21: note = Synthetic: OR10R2 forward primer
  source 1..21: mol_type = other DNA
ctatgctgccatttgtcaccc

SEQ ID NO: 1512 - DNA, 20 bp, synthetic construct
  misc_feature 1..20: note = Synthetic: OR10R2 reverse primer
  source 1..20: mol_type = other DNA
agaagccaccaattgcacag

SEQ ID NO: 1513 - DNA, 22 bp, synthetic construct
  misc_feature 1..22: note = Synthetic: OR10K2 forward primer
  source 1..22: mol_type = other DNA
atcctggcttgaggagtagttg

SEQ ID NO: 1514 - DNA, 27 bp, synthetic construct
  misc_feature 1..27: note = Synthetic: OR10K2 reverse primer
  source 1..27: mol_type = other DNA
ctcattattgtcactgtccactatggc

SEQ ID NO: 1515 - DNA, 24 bp, synthetic construct
  misc_feature 1..24: note = Synthetic: OR10K2 forward primer
  source 1..24: mol_type = other DNA
ggattacagtcgtgagaaactgca

SEQ ID NO: 1516 - DNA, 34 bp, synthetic construct
  misc_feature 1..34: note = Synthetic: OR10K2 reverse primer
  source 1..34: mol_type = other DNA
aatgatttatagcttgagaaataaagagttcaaa

SEQ ID NO: 1517 - DNA, 30 bp, synthetic construct
  misc_feature 1..30: note = Synthetic: OR10K2 forward primer
  source 1..30: mol_type = other DNA
cttctcacaattttacaaagagctgatttg

SEQ ID NO: 1518 - DNA, 24 bp, synthetic construct
  misc_feature 1..24: note = Synthetic: OR10K2 reverse primer
  source 1..24: mol_type = other DNA
tatcctacactattataactccat

SEQ ID NO: 1519 - DNA, 22 bp, synthetic construct
  misc_feature 1..22: note = Synthetic: OR10K1 forward primer
  source 1..22: mol_type = other DNA
gtcaccacctccctagtatttc

SEQ ID NO: 1520 - DNA, 22 bp, synthetic construct
  misc_feature 1..22: note = Synthetic: OR10K1 reverse primer
  source 1..22: mol_type = other DNA
ggacaggggagatgtcacagaa

SEQ ID NO: 1521 - DNA, 20 bp, synthetic construct
  misc_feature 1..20: note = Synthetic: OR10K1 forward primer
  source 1..20: mol_type = other DNA
ctccaaccagctccatcact

SEQ ID NO: 1522 - DNA, 25 bp, synthetic construct
  misc_feature 1..25: note = Synthetic: OR10K1 reverse primer
  source 1..25: mol_type = other DNA
tgaatatgaccagctgactgaagcc

SEQ ID NO: 1523 - DNA, 20 bp, synthetic construct
  misc_feature 1..20: note = Synthetic: OR10G7 forward primer
  source 1..20: mol_type = other DNA
gacagcagagtgcagagagc

SEQ ID NO: 1524 - DNA, 17 bp, synthetic construct
  misc_feature 1..17: note = Synthetic: OR10G7 reverse primer
  source 1..17: mol_type = other DNA
tgggcgctcgtgtactc

SEQ ID NO: 1525 - DNA, 17 bp, synthetic construct
  misc_feature 1..17: note = Synthetic: OR10G7 forward primer
  source 1..17: mol_type = other DNA
tgccggtggccaggagg

SEQ ID NO: 1526 - DNA, 22 bp, synthetic construct
  misc_feature 1..22: note = Synthetic: OR10G7 reverse primer
  source 1..22: mol_type = other DNA
tcagttacccgctcaggtacac

SEQ ID NO: 1527 - DNA, 20 bp, synthetic construct
  misc_feature 1..20: note = Synthetic: OR10G7 forward primer
  source 1..20: mol_type = other DNA
ctcgttggctgaggtgtctg

SEQ ID NO: 1528 - DNA, 21 bp, synthetic construct
  misc_feature 1..21: note = Synthetic: OR10G7 reverse primer
  source 1..21: mol_type = other DNA
actgtggacccaaccagatcc

SEQ ID NO: 1529 - DNA, 20 bp, synthetic construct
  misc_feature 1..20: note = Synthetic: OR10G7 forward primer
  source 1..20: mol_type = other DNA
ggtgcgtcacagaagtagtg

SEQ ID NO: 1530 - DNA, 23 bp, synthetic construct
  misc_feature 1..23: note = Synthetic: OR10G7 reverse primer
  source 1..23: mol_type = other DNA
cagaccatattgactttccattt

SEQ ID NO: 1531 - DNA, 20 bp, synthetic construct
  misc_feature 1..20: note = Synthetic: OPCML forward primer
  source 1..20: mol_type = other DNA
tgcaggtccactcacagttt

SEQ ID NO: 1532 - DNA, 19 bp, synthetic construct
  misc_feature 1..19: note = Synthetic: OPCML reverse primer
  source 1..19: mol_type = other DNA
ccggggagtacgaatgcag

SEQ ID NO: 1533 - DNA, 19 bp, synthetic construct
  misc_feature 1..19: note = Synthetic: NYAP1 forward primer
  source 1..19: mol_type = other DNA
actgtaggccccctgaccc

SEQ ID NO: 1534 - DNA, 17 bp, synthetic construct
  misc_feature 1..17: note = Synthetic: NYAP1 reverse primer
  source 1..17: mol_type = other DNA
ggcccccacaccacagc

SEQ ID NO: 1535 - DNA, 17 bp, synthetic construct
  misc_feature 1..17: note = Synthetic: NYAP1 forward primer
  source 1..17: mol_type = other DNA
ggggtgctgaataaggg

SEQ ID NO: 1536 - DNA, 19 bp, synthetic construct
  misc_feature 1..19: note = Synthetic: NYAP1 reverse primer
  source 1..19: mol_type = other DNA
gacgtgggcacaggagatg

SEQ ID NO: 1537 - DNA, 21 bp, synthetic construct
  misc_feature 1..21: note = Synthetic: NWD1 forward primer
  source 1..21: mol_type = other DNA
tggacacctccagtgagatca

SEQ ID NO: 1538 - DNA, 20 bp, synthetic construct
  misc_feature 1..20: note = Synthetic: NWD1 reverse primer
  source 1..20: mol_type = other DNA
tatcacgtcctgcctggaat

SEQ ID NO: 1539 - DNA, 19 bp, synthetic construct
  misc_feature 1..19: note = Synthetic: NWD1 forward primer
  source 1..19: mol_type = other DNA
tccttgtgttccccctgaa

SEQ ID NO: 1540 - DNA, 19 bp, synthetic construct
  misc_feature 1..19: note = Synthetic: NWD1 reverse primer
  source 1..19: mol_type = other DNA
gcacttgctcagggacatg

SEQ ID NO: 1541 - DNA, 26 bp, synthetic construct
  misc_feature 1..26: note = Synthetic: NTM forward primer
  source 1..26: mol_type = other DNA
aatacttggaaattcagggcatcacc

SEQ ID NO: 1542 - DNA, 23 bp, synthetic construct
  misc_feature 1..23: note = Synthetic: NTM reverse primer
  source 1..23: mol_type = other DNA
gtgacctttactctccgtaccac

SEQ ID NO: 1543 - DNA, 19 bp, synthetic construct
  misc_feature 1..19: note = Synthetic: NTM forward primer
  source 1..19: mol_type = other DNA
gcagtgcctccaatgacgt

SEQ ID NO: 1544 - DNA, 24 bp, synthetic construct
  misc_feature 1..24: note = Synthetic: NTM reverse primer
  source 1..24: mol_type = other DNA
tggtggtgagaacacttacagttc

SEQ ID NO: 1545 - DNA, 25 bp, synthetic construct
  misc_feature 1..25: note = Synthetic: NT5C1B forward primer
  source 1..25: mol_type = other DNA
cttaatttcctcacctctgctacag

SEQ ID NO: 1546 - DNA, 21 bp, synthetic construct
  misc_feature 1..21: note = Synthetic: NT5C1B reverse primer
  source 1..21: mol_type = other DNA
agagtctagaagcagaaaaaa

SEQ ID NO: 1547 - DNA, 26 bp, synthetic construct
  misc_feature 1..26: note = Synthetic: NT5C1B forward primer
  source 1..26: mol_type = other DNA
actcctgttttgtcagattcctttct

SEQ ID NO: 1548 - DNA, 27 bp, synthetic construct
  misc_feature 1..27: note = Synthetic: NT5C1B reverse primer
  source 1..27: mol_type = other DNA
aagttcctaatgccctgagattaaaaa

SEQ ID NO: 1549 - DNA, 23 bp, synthetic construct
  misc_feature 1..23: note = Synthetic: NRXN3 forward primer
  source 1..23: mol_type = other DNA
aaggaccagagaccttgtatgca

SEQ ID NO: 1550 - DNA, 23 bp, synthetic construct
  misc_feature 1..23: note = Synthetic: NRXN3 reverse primer
  source 1..23: mol_type = other DNA
tagtcatactcaccctcagccac

SEQ ID NO: 1551 - DNA, 25 bp, synthetic construct
  misc_feature 1..25: note = Synthetic: NRXN3 forward primer
  source 1..25: mol_type = other DNA
gccttaagttaaccgtggatgatga

SEQ ID NO: 1552 - DNA, 32 bp, synthetic construct
  misc_feature 1..32: note = Synthetic: NRXN3 reverse primer
  source 1..32: mol_type = other DNA
tgacttctactatgcaaaataaaaggttttgc

SEQ ID NO: 1553 - DNA, 29 bp, synthetic construct
  misc_feature 1..29: note = Synthetic: NRXN1 forward primer
  source 1..29: mol_type = other DNA
aaggaagcatccaagaagcaaaattataa

SEQ ID NO: 1554 - DNA, 21 bp, synthetic construct
  misc_feature 1..21: note = Synthetic: NRXN1 reverse primer
  source 1..21: mol_type = other DNA
tattggtgcgagtggacagtt

SEQ ID NO: 1555 - DNA, 21 bp, synthetic construct
  misc_feature 1..21: note = Synthetic: NRXN1 forward primer
  source 1..21: mol_type = other DNA
gtagtcacccaagcctgaaga

SEQ ID NO: 1556 - DNA, 23 bp, synthetic construct
  misc_feature 1..23: note = Synthetic: NRXN1 reverse primer
  source 1..23: mol_type = other DNA
acagactggccataggttttagc

SEQ ID NO: 1557 - DNA, 24 bp, synthetic construct
  misc_feature 1..24: note = Synthetic: NRG3 forward primer
  source 1..24: mol_type = other DNA
ttcacaaccacatgcgtatgtttg

SEQ ID NO: 1558 - DNA, 25 bp, synthetic construct
  misc_feature 1..25: note = Synthetic: NRG3 reverse primer
  source 1..25: mol_type = other DNA
tggaatcagttttcggcagaaattg

SEQ ID NO: 1559 - DNA, 22 bp, synthetic construct
  misc_feature 1..22: note = Synthetic: NRG3 forward primer
  source 1..22: mol_type = other DNA
accaaggagtccgttgtgatca

SEQ ID NO: 1560 - DNA, 24 bp, synthetic construct
  misc_feature 1..24: note = Synthetic: NRG3 reverse primer
  source 1..24: mol_type = other DNA
cttgacctacttggatccgataag

SEQ ID NO: 1561 - DNA, 22 bp, synthetic construct
  misc_feature 1..22: note = Synthetic: NRAS forward primer
  source 1..22: mol_type = other DNA
gcaaatacacagaggaagcctt

SEQ ID NO: 1562 - DNA, 26 bp, synthetic construct
  misc_feature 1..26: note = Synthetic: NRAS reverse primer
  source 1..26: mol_type = other DNA
cctgtttgttggacatactggataca

SEQ ID NO: 1563 - DNA, 23 bp, synthetic construct
  misc_feature 1..23: note = Synthetic: NRAS forward primer
  source 1..23: mol_type = other DNA
tctcatggcactgtactcttctt

SEQ ID NO: 1564 - DNA, 24 bp, synthetic construct
  misc_feature 1..24: note = Synthetic: NRAS reverse primer
  source 1..24: mol_type = other DNA
acccccaggattcttacagaaaac

SEQ ID NO: 1565 - DNA, 21 bp, synthetic construct
  misc_feature 1..21: note = Synthetic: NRAS forward primer
  source 1..21: mol_type = other DNA
tggattgtcagtgcgcttttc

SEQ ID NO: 1566 - DNA, 21 bp, synthetic construct
  misc_feature 1..21: note = Synthetic: NRAS reverse primer
  source 1..21: mol_type = other DNA
aacaggttcttgctggtgtga

SEQ ID NO: 1567 - DNA, 19 bp, synthetic construct
  misc_feature 1..19: note = Synthetic: NPAP1 forward primer
  source 1..19: mol_type = other DNA
caagaagggcccagaagag

SEQ ID NO: 1568 - DNA, 21 bp, synthetic construct
  misc_feature 1..21: note = Synthetic: NPAP1 reverse primer
  source 1..21: mol_type = other DNA
atgcttctccgctgctaaggg

SEQ ID NO: 1569 - DNA, 21 bp, synthetic construct
  misc_feature 1..21: note = Synthetic: NPAP1 forward primer
  source 1..21: mol_type = other DNA
atcgaaggggaggatgacgag

SEQ ID NO: 1570 - DNA, 19 bp, synthetic construct
  misc_feature 1..19: note = Synthetic: NPAP1 reverse primer
  source 1..19: mol_type = other DNA
ctgaaggaggccacgtctc

SEQ ID NO: 1571 - DNA, 19 bp, synthetic construct
  misc_feature 1..19: note = Synthetic: NOVA1 forward primer
  source 1..19: mol_type = other DNA
tacccaccgcccgtattgg

SEQ ID NO: 1572 - DNA, 19 bp, synthetic construct
  misc_feature 1..19: note = Synthetic: NOVA1 reverse primer
  source 1..19: mol_type = other DNA
acactggggttcccataga

SEQ ID NO: 1573 - DNA, 22 bp, synthetic construct
  misc_feature 1..22: note = Synthetic: NOVA1 forward primer
  source 1..22: mol_type = other DNA
ctgcagcagttggtaacacttc

SEQ ID NO: 1574 - DNA, 22 bp, synthetic construct
  misc_feature 1..22: note = Synthetic: NOVA1 reverse primer
  source 1..22: mol_type = other DNA
tatgccaatgtgacaggtccag

SEQ ID NO: 1575 - DNA, 23 bp, synthetic construct
  misc_feature 1..23: note = Synthetic: NOVA1 forward primer
  source 1..23: mol_type = other DNA
ataaggagatccggttggattgg

SEQ ID NO: 1576 - DNA, 21 bp, synthetic construct
  misc_feature 1..21: note = Synthetic: NOVA1 reverse primer
  source 1..21: mol_type = other DNA
aaagtggcagctgtctcaata

SEQ ID NO: 1577 - DNA, 23 bp, synthetic construct
  misc_feature 1..23: note = Synthetic: NOS3 forward primer
  source 1..23: mol_type = other DNA
atgaagcacctggagaatgagca

SEQ ID NO: 1578 - DNA, 23 bp, synthetic construct
  misc_feature 1..23: note = Synthetic: NOS3 reverse primer
  source 1..23: mol_type = other DNA
tgatggaaaacaggagtgaggct

SEQ ID NO: 1579 - DNA, 23 bp, synthetic construct
  misc_feature 1..23: note = Synthetic: NOS1 forward primer
  source 1..23: mol_type = other DNA
atttagggctctggaggttttga

SEQ ID NO: 1580 - DNA, 23 bp, synthetic construct
  misc_feature 1..23: note = Synthetic: NOS1 reverse primer
  source 1..23: mol_type = other DNA
ttttctccccacaggtctatcca

SEQ ID NO: 1581 - DNA, 21 bp, synthetic construct
  misc_feature 1..21: note = Synthetic: NOS1 forward primer
  source 1..21: mol_type = other DNA
gcagctgagactcgctttttg

SEQ ID NO: 1582 - DNA, 23 bp, synthetic construct
  misc_feature 1..23: note = Synthetic: NOS1 reverse primer
  source 1..23: mol_type = other DNA
cattcaaccccttctcaggaaga

SEQ ID NO: 1583 - DNA, 21 bp, synthetic construct
  misc_feature 1..21: note = Synthetic: NOL4 forward primer
  source 1..21: mol_type = other DNA
ggtcgtctgtctcagttctgt

SEQ ID NO: 1584 - DNA, 24 bp, synthetic construct
  misc_feature 1..24: note = Synthetic: NOL4 reverse primer
  source 1..24: mol_type = other DNA
gcttgttgcaggatatcgagaatc

SEQ ID NO: 1585 - DNA, 21 bp, synthetic construct
  misc_feature 1..21: note = Synthetic: NOL4 forward primer
  source 1..21: mol_type = other DNA
gttcatctgcagatcgcaata

SEQ ID NO: 1586 - DNA, 23 bp, synthetic construct
  misc_feature 1..23: note = Synthetic: NOL4 reverse primer
  source 1..23: mol_type = other DNA
actgaaatcaatgccgtgagaca

SEQ ID NO: 1587 - DNA, 19 bp, synthetic construct
  misc_feature 1..19: note = Synthetic: NOBOX forward primer
  source 1..19: mol_type = other DNA
caccgtctgggcaatctct

SEQ ID NO: 1588 - DNA, 22 bp, synthetic construct
  misc_feature 1..22: note = Synthetic: NOBOX reverse primer
  source 1..22: mol_type = other DNA
gctggaggagctagagaagata

SEQ ID NO: 1589 - DNA, 24 bp, synthetic construct
  misc_feature 1..24: note = Synthetic: NOBOX forward primer
  source 1..24: mol_type = other DNA
gtcaggatagtggtcttcttggaa

SEQ ID NO: 1590 - DNA, 23 bp, synthetic construct
  misc_feature 1..23: note = Synthetic: NOBOX reverse primer
  source 1..23: mol_type = other DNA
ctacctgtcactggcatttgtcc

SEQ ID NO: 1591 - DNA, 21 bp, synthetic construct
  misc_feature 1..21: note = Synthetic: NLRP8 forward primer
  source 1..21: mol_type = other DNA
acaggaaatgggtgttaggta

SEQ ID NO: 1592 - DNA, 20 bp, synthetic construct
  misc_feature 1..20: note = Synthetic: NLRP8 reverse primer
  source 1..20: mol_type = other DNA
tcacctgcaattctccgaag

SEQ ID NO: 1593 - DNA, 20 bp, synthetic construct
  misc_feature 1..20: note = Synthetic: NLRP8 forward primer
  source 1..20: mol_type = other DNA
cttccttggcatgagtattc

SEQ ID NO: 1594 - DNA, 24 bp, synthetic construct
  misc_feature 1..24: note = Synthetic: NLRP8 reverse primer
  source 1..24: mol_type = other DNA
tgaaaagtcacgagggtaaagaca

SEQ ID NO: 1595 - DNA, 23 bp, synthetic construct
  misc_feature 1..23: note = Synthetic: NLRP7 forward primer
  source 1..23: mol_type = other DNA
agtgagagtttctgcaagtcttg

SEQ ID NO: 1596 - DNA, 17 bp, synthetic construct
  misc_feature 1..17: note = Synthetic: NLRP7 reverse primer
  source 1..17: mol_type = other DNA
gagctggcgaaggtggt

SEQ ID NO: 1597 - DNA, 17 bp, synthetic construct
  misc_feature 1..17: note = Synthetic: NLRP7 forward primer
  source 1..17: mol_type = other DNA
tgaacggggccaccacc

SEQ ID NO: 1598 - DNA, 22 bp, synthetic construct
  misc_feature 1..22: note = Synthetic: NLRP7 reverse primer
  source 1..22: mol_type = other DNA
tatccgtgaccgacctgaagga

SEQ ID NO: 1599 - DNA, 20 bp, synthetic construct
  misc_feature 1..20: note = Synthetic: NLRP5 forward primer
  source 1..20: mol_type = other DNA
tccagcactgtccgtatttg

SEQ ID NO: 1600 - DNA, 20 bp, synthetic construct
  misc_feature 1..20: note = Synthetic: NLRP5 reverse primer
  source 1..20: mol_type = other DNA
tcagcggactcatctcttgg

SEQ ID NO: 1601 - DNA, 21 bp, synthetic construct
  misc_feature 1..21: note = Synthetic: NLRP5 forward primer
  source 1..21: mol_type = other DNA
ggtggatgtcaaagggatctt

SEQ ID NO: 1602 - DNA, 23 bp, synthetic construct
  misc_feature 1..23: note = Synthetic: NLRP5 reverse primer
  source 1..23: mol_type = other DNA
gataaaactgcctggggtactca

SEQ ID NO: 1603 - DNA, 23 bp, synthetic construct
  misc_feature 1..23: note = Synthetic: NLRP4 forward primer
  source 1..23: mol_type = other DNA
tgaacctcctccaagaagctaac

SEQ ID NO: 1604 - DNA, 28 bp, synthetic construct
  misc_feature 1..28: note = Synthetic: NLRP4 reverse primer
  source 1..28: mol_type = other DNA
ctctttcttaaagacattttgaacggaa

SEQ ID NO: 1605 - DNA, 23 bp, synthetic construct
  misc_feature 1..23: note = Synthetic: NLRP4 forward primer
  source 1..23: mol_type = other DNA
cagcttgaggaaactctgttttt

SEQ ID NO: 1606 - DNA, 24 bp, synthetic construct
  misc_feature 1..24: note = Synthetic: NLRP4 reverse primer
  source 1..24: mol_type = other DNA
ataggatggactcacgtagagctg

SEQ ID NO: 1607 - DNA, 20 bp, synthetic construct
  misc_feature 1..20: note = Synthetic: NLRP12 forward primer
  source 1..20: mol_type = other DNA
ctgcatggggtttgagtgct

SEQ ID NO: 1608 - DNA, 20 bp, synthetic construct
  misc_feature 1..20: note = Synthetic: NLRP12 reverse primer
  source 1..20: mol_type = other DNA
tcatggaagaccgcaatgcg

SEQ ID NO: 1609 - DNA, 23 bp, synthetic construct
  misc_feature 1..23: note = Synthetic: NLRP12 forward primer
  source 1..23: mol_type = other DNA
tgaggttgacacattcccctagg

SEQ ID NO: 1610 - DNA, 24 bp, synthetic construct
  misc_feature 1..24: note = Synthetic: NLRP12 reverse primer
  source 1..24: mol_type = other DNA
aggaaacctacagggactatgtcc

SEQ ID NO: 1611 - DNA, 20 bp, synthetic construct
  misc_feature 1..20: note = Synthetic: NLRP11 forward primer
  source 1..20: mol_type = other DNA
cagcttcctgtgaagtgccc

SEQ ID NO: 1612 - DNA, 28 bp, synthetic construct
  misc_feature 1..28: note = Synthetic: NLRP11 reverse primer
  source 1..28: mol_type = other DNA
agcatattttcaatgatgcgtaaggaag

SEQ ID NO: 1613 - DNA, 24 bp, synthetic construct
  misc_feature 1..24: note = Synthetic: NLRP11 forward primer
  source 1..24: mol_type = other DNA
ctgccaatgatcttcctacaaaga

SEQ ID NO: 1614 - DNA, 23 bp, synthetic construct
  misc_feature 1..23: note = Synthetic: NLRP11 reverse primer
  source 1..23: mol_type = other DNA
aatctcttatgagggacagtata

SEQ ID NO: 1615 - DNA, 25 bp, synthetic construct
  misc_feature 1..25: note = Synthetic: NLGN1 forward primer
  source 1..25: mol_type = other DNA
gtatatccatggtggctcatatatg

SEQ ID NO: 1616 - DNA, 24 bp, synthetic construct
  misc_feature 1..24: note = Synthetic: NLGN1 reverse primer
  source 1..24: mol_type = other DNA
caagtcgatagttgactgtgatga

SEQ ID NO: 1617 - DNA, 23 bp, synthetic construct
  misc_feature 1..23: note = Synthetic: NLGN1 forward primer
  source 1..23: mol_type = other DNA
aagttatggcaatgtgatcgtca

SEQ ID NO: 1618 - DNA, 27 bp, synthetic construct
  misc_feature 1..27: note = Synthetic: NLGN1 reverse primer
  source 1..27: mol_type = other DNA
acatacttcatggattcatggtgaaaa

SEQ ID NO: 1619 - DNA, 21 bp, synthetic construct
  misc_feature 1..21: note = Synthetic: NIM1K forward primer
  source 1..21: mol_type = other DNA
gaaggtggtgagggagatcac

SEQ ID NO: 1620 - DNA, 23 bp, synthetic construct
  misc_feature 1..23: note = Synthetic: NIM1K reverse primer
  source 1..23: mol_type = other DNA
cttcacttgggagaagtttccac

SEQ ID NO: 1621 - DNA, 23 bp, synthetic construct
  misc_feature 1..23: note = Synthetic: NIM1K forward primer
  source 1..23: mol_type = other DNA
taggcttctaccgaattcgaggg

SEQ ID NO: 1622 - DNA, 24 bp, synthetic construct
  misc_feature 1..24: note = Synthetic: NIM1K reverse primer
  source 1..24: mol_type = other DNA
cctacctttggttagggagtgaat

SEQ ID NO: 1623 - DNA, 28 bp, synthetic construct
  misc_feature 1..28: note = Synthetic: NFE2L2 forward primer
  source 1..28: mol_type = other DNA
ttctgtttttccagctcatactctttcc

SEQ ID NO: 1624 - DNA, 29 bp, synthetic construct
  misc_feature 1..29: note = Synthetic: NFE2L2 reverse primer
  source 1..29: mol_type = other DNA
ctttggaggcaagatatagatcttggagt

SEQ ID NO: 1625 - DNA, 26 bp, synthetic construct
  misc_feature 1..26: note = Synthetic: NFE2L2 forward primer
  source 1..26: mol_type = other DNA
cgctgactgaagtcaaatacttctcg

SEQ ID NO: 1626 - DNA, 31 bp, synthetic construct
  misc_feature 1..31: note = Synthetic: NFE2L2 reverse primer
  source 1..31: mol_type = other DNA
gtcttaaacataggacatggatttgattgac

SEQ ID NO: 1627 - DNA, 25 bp, synthetic construct
  misc_feature 1..25: note = Synthetic: NFE2L2 forward primer
  source 1..25: mol_type = other DNA
tactctgtacctgggagtagttggc

SEQ ID NO: 1628 - DNA, 25 bp, synthetic construct
  misc_feature 1..25: note = Synthetic: NFE2L2 reverse primer
  source 1..25: mol_type = other DNA
tttttcgctcagttacaactagatg

SEQ ID NO: 1629 - DNA, 22 bp, synthetic construct
  misc_feature 1..22: note = Synthetic: NFE2L2 forward primer
  source 1..22: mol_type = other DNA
ctggctgaattgggagaaattc

SEQ ID NO: 1630 - DNA, 26 bp, synthetic construct
  misc_feature 1..26: note = Synthetic: NFE2L2 reverse primer
  source 1..26: mol_type = other DNA
gaaagacaagaacaactccaaaagga

SEQ ID NO: 1631 - DNA, 21 bp, synthetic construct
  misc_feature 1..21: note = Synthetic: NFASC forward primer
  source 1..21: mol_type = other DNA
cagccatcaccctcactttat

SEQ ID NO: 1632 - DNA, 17 bp, synthetic construct
  misc_feature 1..17: note = Synthetic: NFASC reverse primer
  source 1..17: mol_type = other DNA
ggttgcactggagcgtc

SEQ ID NO: 1633 - DNA, 18 bp, synthetic construct
  misc_feature 1..18: note = Synthetic: NFASC forward primer
  source 1..18: mol_type = other DNA
caagagggcgctcctttg

SEQ ID NO: 1634 - DNA, 21 bp, synthetic construct
  misc_feature 1..21: note = Synthetic: NFASC reverse primer
  source 1..21: mol_type = other DNA
agatgaccggggatggaagtc

SEQ ID NO: 1635 - DNA, 29 bp, synthetic construct
  misc_feature 1..29: note = Synthetic: NEUROD6 forward primer
  source 1..29: mol_type = other DNA
ctattttggacagtttctgggttttagaa

SEQ ID NO: 1636 - DNA, 20 bp, synthetic construct
  misc_feature 1..20: note = Synthetic: NEUROD6 reverse primer
  source 1..20: mol_type = other DNA
ggagacaggaagcgaacgcg

SEQ ID NO: 1637 - DNA, 20 bp, synthetic construct
  misc_feature 1..20: note = Synthetic: NEUROD6 forward primer
  source 1..20: mol_type = other DNA
tgtccagagcgtcgttgagg

SEQ ID NO: 1638 - DNA, 21 bp, synthetic construct
  misc_feature 1..21: note = Synthetic: NEUROD6 reverse primer
  source 1..21: mol_type = other DNA
cgattggaaagggtcaagttc

SEQ ID NO: 1639 - DNA, 30 bp, synthetic construct
  misc_feature 1..30: note = Synthetic: NETO1 forward primer
  source 1..30: mol_type = other DNA
agtacttacttaccaggtgtgaaattgtat

SEQ ID NO: 1640 - DNA, 31 bp, synthetic construct
  misc_feature 1..31: note = Synthetic: NETO1 reverse primer
  source 1..31: mol_type = other DNA
taaaatccagtggaagatttctatggattaa

SEQ ID NO: 1641 - DNA, 23 bp, synthetic construct
  misc_feature 1..23: note = Synthetic: NETO1 forward primer
  source 1..23: mol_type = other DNA
cagctctccatcagcaaaaaatt

SEQ ID NO: 1642 - DNA, 25 bp, synthetic construct
  misc_feature 1..25: note = Synthetic: NETO1 reverse primer
  source 1..25: mol_type = other DNA
cgtttctgtggacaacaaaatccac

SEQ ID NO: 1643 - DNA, 25 bp, synthetic construct
  misc_feature 1..25: note = Synthetic: NELL1 forward primer
  source 1..25: mol_type = other DNA
tagaaggtacctctgaggtcatttt

SEQ ID NO: 1644 - DNA, 20 bp, synthetic construct
  misc_feature 1..20: note = Synthetic: NELL1 reverse primer
  source 1..20: mol_type = other DNA
ttcccgacagctcttggtta

SEQ ID NO: 1645 - DNA, 17 bp, synthetic construct
  misc_feature 1..17: note = Synthetic: NELL1 forward primer
  source 1..17: mol_type = other DNA
gaaggccagcggatttt

SEQ ID NO: 1646 - DNA, 31 bp, synthetic construct
  misc_feature 1..31: note = Synthetic: NELL1 reverse primer
  source 1..31: mol_type = other DNA
gatagggaccataaaattaacacttactcgg

SEQ ID NO: 1647 - DNA, 20 bp, synthetic construct
  misc_feature 1..20: note = Synthetic: NELL1 forward primer
  source 1..20: mol_type = other DNA
ccattcccgctgcgttaacc

SEQ ID NO: 1648 - DNA, 21 bp, synthetic construct
  misc_feature 1..21: note = Synthetic: NELL1 reverse primer
  source 1..21: mol_type = other DNA
gacagtgaataggtcccatcg

SEQ ID NO: 1649 - DNA, 21 bp, synthetic construct
  misc_feature 1..21: note = Synthetic: NELL1 forward primer
  source 1..21: mol_type = other DNA
ccactgtgagtgcagaagcgg

SEQ ID NO: 1650 - DNA, 24 bp, synthetic construct
  misc_feature 1..24: note = Synthetic: NELL1 reverse primer
  source 1..24: mol_type = other DNA
tgaaagctgcttaccaatacagga

SEQ ID NO: 1651 - DNA, 22 bp, synthetic construct
  misc_feature 1..22: note = Synthetic: NELFA forward primer
  source 1..22: mol_type = other DNA
acattggtcatgggcttgtact

SEQ ID NO: 1652 - DNA, 20 bp, synthetic construct
  misc_feature 1..20: note = Synthetic: NELFA reverse primer
  source 1..20: mol_type = other DNA
agggtagcacaaccatgctg

SEQ ID NO: 1653 - DNA, 25 bp, synthetic construct
  misc_feature 1..25: note = Synthetic: NDST3 forward primer
  source 1..25: mol_type = other DNA
tccaattaacatttgcttggtctta

SEQ ID NO: 1654 - DNA, 26 bp, synthetic construct
  misc_feature 1..26: note = Synthetic: NDST3 reverse primer
  source 1..26: mol_type = other DNA
aagctgaacatgtacagggtagacgc

SEQ ID NO: 1655 - DNA, 18 bp, synthetic construct
  misc_feature 1..18: note = Synthetic: NDST3 forward primer
  source 1..18: mol_type = other DNA
tggcccctcaccattcgg

SEQ ID NO: 1656 - DNA, 26 bp, synthetic construct
  misc_feature 1..26: note = Synthetic: NDST3 reverse primer
  source 1..26: mol_type = other DNA
cttcagatgtggatattcttcagtgc

SEQ ID NO: 1657 - DNA, 27 bp, synthetic construct
  misc_feature 1..27: note = Synthetic: NCAM2 forward primer
  source 1..27: mol_type = other DNA
cgattggtgaacctgaaagtatagatt

SEQ ID NO: 1658 - DNA, 24 bp, synthetic construct
  misc_feature 1..24: note = Synthetic: NCAM2 reverse primer
  source 1..24: mol_type = other DNA
attgtagatggttaaccgtgacct

SEQ ID NO: 1659 - DNA, 23 bp, synthetic construct
  misc_feature 1..23: note = Synthetic: NCAM2 forward primer
  source 1..23: mol_type = other DNA
ggtagtagtgcaaaaggaaggtg

SEQ ID NO: 1660 - DNA, 21 bp, synthetic construct
  misc_feature 1..21: note = Synthetic: NCAM2 reverse primer
  source 1..21: mol_type = other DNA
gcatctgttgcttgacaacga

SEQ ID NO: 1661 - DNA, 21 bp, synthetic construct
  misc_feature 1..21: note = Synthetic: NCAM1 forward primer
  source 1..21: mol_type = other DNA
tgccacgatctcatggtttcg

SEQ ID NO: 1662 - DNA, 23 bp, synthetic construct
  misc_feature 1..23: note = Synthetic: NCAM1 reverse primer
  source 1..23: mol_type = other DNA
gagggggtgttgtagatcttgat

SEQ ID NO: 1663 - DNA, 21 bp, synthetic construct
  misc_feature 1..21: note = Synthetic: NCAM1 forward primer
  source 1..21: mol_type = other DNA
ctgccaagctccaattacagc

SEQ ID NO: 1664 - DNA, 21 bp, synthetic construct
  misc_feature 1..21: note = Synthetic: NCAM1 reverse primer
  source 1..21: mol_type = other DNA
gcccacctagagtcaaactgt

SEQ ID NO: 1665 - DNA, 27 bp, synthetic construct
  misc_feature 1..27: note = Synthetic: NAV3 forward primer
  source 1..27: mol_type = other DNA
cttgtagatgtgcttaagtgtcatagc

SEQ ID NO: 1666 - DNA, 23 bp, synthetic construct
  misc_feature 1..23: note = Synthetic: NAV3 reverse primer
  source 1..23: mol_type = other DNA
cagtagaatgagaacgcaaccac

SEQ ID NO: 1667 - DNA, 21 bp, synthetic construct
  misc_feature 1..21: note = Synthetic: NAV3 forward primer
  source 1..21: mol_type = other DNA
accaagaagagggcaaagagt

SEQ ID NO: 1668 - DNA, 34 bp, synthetic construct
  misc_feature 1..34: note = Synthetic: NAV3 reverse primer
  source 1..34: mol_type = other DNA
atattttacccaagttagaaaagtggtattttcc

SEQ ID NO: 1669 - DNA, 24 bp, synthetic construct
  misc_feature 1..24: note = Synthetic: NAV3 forward primer
  source 1..24: mol_type = other DNA
tgaaggcagaaactggtaacacag

SEQ ID NO: 1670 - DNA, 22 bp, synthetic construct
  misc_feature 1..22: note = Synthetic: NAV3 reverse primer
  source 1..22: mol_type = other DNA
gcctggaagatgaagaggaggt

SEQ ID NO: 1671 - DNA, 21 bp, synthetic construct
  misc_feature 1..21: note = Synthetic: NAV3 forward primer
  source 1..21: mol_type = other DNA
cgtcagaatcctcaagcagca

SEQ ID NO: 1672 - DNA, 23 bp, synthetic construct
  misc_feature 1..23: note = Synthetic: NAV3 reverse primer
  source 1..23: mol_type = other DNA
ctaacagcctctgtgatgttcaa

SEQ ID NO: 1673 - DNA, 24 bp, synthetic construct
  misc_feature 1..24: note = Synthetic: NAALAD2 forward primer
  source 1..24: mol_type = other DNA
aatgtattcaaagttgtaggtttc

SEQ ID NO: 1674 - DNA, 21 bp, synthetic construct
  misc_feature 1..21: note = Synthetic: NAALAD2 reverse primer
  source 1..21: mol_type = other DNA
actggttgggtcaatagctcc

SEQ ID NO: 1675 - DNA, 20 bp, synthetic construct
  misc_feature 1..20: note = Synthetic: NAALAD2 forward primer
  source 1..20: mol_type = other DNA
cgggactcctgggtatttgg

SEQ ID NO: 1676 - DNA, 23 bp, synthetic construct
  misc_feature 1..23: note = Synthetic: NAALAD2 reverse primer
  source 1..23: mol_type = other DNA
caaaactccgggcaatttcttgc

SEQ ID NO: 1677 - DNA, 18 bp, synthetic construct
  misc_feature 1..18: note = Synthetic: MYO18A forward primer
  source 1..18: mol_type = other DNA
caggctccgaagctctgc

SEQ ID NO: 1678 - DNA, 24 bp, synthetic construct
  misc_feature 1..24: note = Synthetic: MYO18A reverse primer
  source 1..24: mol_type = other DNA
cccccaccatgtttaacctaatga

SEQ ID NO: 1679 - DNA, 23 bp, synthetic construct
  misc_feature 1..23: note = Synthetic: MYO16 forward primer
  source 1..23: mol_type = other DNA
tgcactccacacttcattcattg

SEQ ID NO: 1680 - DNA, 24 bp, synthetic construct
  misc_feature 1..24: note = Synthetic: MYO16 reverse primer
  source 1..24: mol_type = other DNA
atattgtagctgagcagacacgta

SEQ ID NO: 1681 - DNA, 22 bp, synthetic construct
  misc_feature 1..22: note = Synthetic: MYO16 forward primer
  source 1..22: mol_type = other DNA
ccaataactcaaagctgccaga

SEQ ID NO: 1682 - DNA, 24 bp, synthetic construct
  misc_feature 1..24: note = Synthetic: MYO16 reverse primer
  source 1..24: mol_type = other DNA
acagggtatccatatcggaagatc

SEQ ID NO: 1683 - DNA, 17 bp, synthetic construct
  misc_feature 1..17: note = Synthetic: MYLK forward primer
  source 1..17: mol_type = other DNA
cctggtggggaaggtgg

SEQ ID NO: 1684 - DNA, 18 bp, synthetic construct
  misc_feature 1..18: note = Synthetic: MYLK reverse primer
  source 1..18: mol_type = other DNA
ctccatcaccctgcaggc

SEQ ID NO: 1685 - DNA, 20 bp, synthetic construct
  misc_feature 1..20: note = Synthetic: MYLK forward primer
  source 1..20: mol_type = other DNA
ggttccggctgaactcttgc

SEQ ID NO: 1686 - DNA, 19 bp, synthetic construct
  misc_feature 1..19: note = Synthetic: MYLK reverse primer
  source 1..19: mol_type = other DNA
aagggagtccaagctggag

SEQ ID NO: 1687 - DNA, 17 bp, synthetic construct
  misc_feature 1..17: note = Synthetic: MYH7 forward primer
  source 1..17: mol_type = other DNA
ctgcacccgctcactag

SEQ ID NO: 1688 - DNA, 18 bp, synthetic construct
  misc_feature 1..18: note = Synthetic: MYH7 reverse primer
  source 1..18: mol_type = other DNA
aggctgagctggaggagt

SEQ ID NO: 1689 - DNA, 18 bp, synthetic construct
  misc_feature 1..18: note = Synthetic: MYH7 forward primer
  source 1..18: mol_type = other DNA
ctgtctgctccaccacgg

SEQ ID NO: 1690 - DNA, 19 bp, synthetic construct
  misc_feature 1..19: note = Synthetic: MYH7 reverse primer
  source 1..19: mol_type = other DNA
caacgacgacctgaaggag

SEQ ID NO: 1691 - DNA, 21 bp, synthetic construct
  misc_feature 1..21: note = Synthetic: MYF5 forward primer
  source 1..21: mol_type = other DNA
aagcctgcaagaggaagtcca

SEQ ID NO: 1692 - DNA, 18 bp, synthetic construct
  misc_feature 1..18: note = Synthetic: MYF5 reverse primer
  source 1..18: mol_type = other DNA
gttggggttggtcgtggt

SEQ ID NO: 1693 - DNA, 22 bp, synthetic construct
  misc_feature 1..22: note = Synthetic: MYF5 forward primer
  source 1..22: mol_type = other DNA
tttcgaaaccctcaagaggtgt

SEQ ID NO: 1694 - DNA, 19 bp, synthetic construct
  misc_feature 1..19: note = Synthetic: MYF5 reverse primer
  source 1..19: mol_type = other DNA
ctcagcaactcctgcaggc

SEQ ID NO: 1695 - DNA, 23 bp, synthetic construct
  misc_feature 1..23: note = Synthetic: MYF5 forward primer
  source 1..23: mol_type = other DNA
ggtggagatcctcaggaatgcca

SEQ ID NO: 1696 - DNA, 21 bp, synthetic construct
  misc_feature 1..21: note = Synthetic: MYF5 reverse primer
  source 1..21: mol_type = other DNA
cggcaggctatagtagttctc

SEQ ID NO: 1697 - DNA, 22 bp, synthetic construct
  misc_feature 1..22: note = Synthetic: MYC forward primer
  source 1..22: mol_type = other DNA
gacgacgagaccttcatcaaaa

SEQ ID NO: 1698 - DNA, 19 bp, synthetic construct
  misc_feature 1..19: note = Synthetic: MYC reverse primer
  source 1..19: mol_type = other DNA
ctggtaggaggccagcttc

SEQ ID NO: 1699 - DNA, 17 bp, synthetic construct
  misc_feature 1..17: note = Synthetic: MYC forward primer
  source 1..17: mol_type = other DNA
ccaagctcgtctcagag

SEQ ID NO: 1700 - DNA, 20 bp, synthetic construct
  misc_feature 1..20: note = Synthetic: MYC reverse primer
  source 1..20: mol_type = other DNA
tgcaggtacaagctggaggt

SEQ ID NO: 1701 - DNA, 17 bp, synthetic construct
  misc_feature 1..17: note = Synthetic: MXRA8 forward primer
  source 1..17: mol_type = other DNA
tgggctcccgccttccc

SEQ ID NO: 1702 - DNA, 17 bp, synthetic construct
  misc_feature 1..17: note = Synthetic: MXRA8 reverse primer
  source 1..17: mol_type = other DNA
cggtcgccgaaccccac

SEQ ID NO: 1703 - DNA, 22 bp, synthetic construct
  misc_feature 1..22: note = Synthetic: MVK forward primer
  source 1..22: mol_type = other DNA
cgagcctggatatcgtagtgtg

SEQ ID NO: 1704 - DNA, 19 bp, synthetic construct
  misc_feature 1..19: note = Synthetic: MVK reverse primer
  source 1..19: mol_type = other DNA
gtttgggatctcctcgcac

SEQ ID NO: 1705 - DNA, 21 bp, synthetic construct
  misc_feature 1..21: note = Synthetic: MUC16 forward primer
  source 1..21: mol_type = other DNA
ctgaggtgctgctcaaatttg

SEQ ID NO: 1706 - DNA, 21 bp, synthetic construct
  misc_feature 1..21: note = Synthetic: MUC16 reverse primer
  source 1..21: mol_type = other DNA
gactgcacttctcacccttgg

SEQ ID NO: 1707 - DNA, 21 bp, synthetic construct
  misc_feature 1..21: note = Synthetic: MUC16 forward primer
  source 1..21: mol_type = other DNA
caacatgtctgtggtcttcac

SEQ ID NO: 1708 - DNA, 21 bp, synthetic construct
  misc_feature 1..21: note = Synthetic: MUC16 reverse primer
  source 1..21: mol_type = other DNA
ctgccatgacctcaacttctt

SEQ ID NO: 1709 - DNA, 21 bp, synthetic construct
  misc_feature 1..21: note = Synthetic: MUC16 forward primer
  source 1..21: mol_type = other DNA
cccagaatgacctgttttggg

SEQ ID NO: 1710 - DNA, 24 bp, synthetic construct
  misc_feature 1..24: note = Synthetic: MUC16 reverse primer
  source 1..24: mol_type = other DNA
gctcaatccacaatatcaccagaa

SEQ ID NO: 1711 - DNA, 24 bp, synthetic construct
  misc_feature 1..24: note = Synthetic: MUC16 forward primer
  source 1..24: mol_type = other DNA
tctagtgatggtttccgtggagat

SEQ ID NO: 1712 - DNA, 22 bp, synthetic construct
  misc_feature 1..22: note = Synthetic: MUC16 reverse primer
  source 1..22: mol_type = other DNA
acagaagccctctccttaggca

SEQ ID NO: 1713 - DNA, 20 bp, synthetic construct
  misc_feature 1..20: note = Synthetic: MUC16 forward primer
  source 1..20: mol_type = other DNA
aggtcggggatggattgaag

SEQ ID NO: 1714 - DNA, 24 bp, synthetic construct
  misc_feature 1..24: note = Synthetic: MUC16 reverse primer
  source 1..24: mol_type = other DNA
ttggaaaacggctctgatacctct

SEQ ID NO: 1715 - DNA, 23 bp, synthetic construct
  misc_feature 1..23: note = Synthetic: MUC16 forward primer
  source 1..23: mol_type = other DNA
tgtgagtgctgtttcccatagac

SEQ ID NO: 1716 - DNA, 27 bp, synthetic construct
  misc_feature 1..27: note = Synthetic: MUC16 reverse primer
  source 1..27: mol_type = other DNA
tcattgaatactggtgtcactagagcc

SEQ ID NO: 1717 - DNA, 26 bp, synthetic construct
  misc_feature 1..26: note = Synthetic: MUC16 forward primer
  source 1..26: mol_type = other DNA
gcagaaatggaaacaaggtctatatt

SEQ ID NO: 1718 - DNA, 25 bp, synthetic construct
  misc_feature 1..25: note = Synthetic: MUC16 reverse primer
  source 1..25: mol_type = other DNA
agtgaccaccataaagatgtcaagc

SEQ ID NO: 1719 - DNA, 20 bp, synthetic construct
  misc_feature 1..20: note = Synthetic: MUC16 forward primer
  source 1..20: mol_type = other DNA
gccacgtggaatttccttgt

SEQ ID NO: 1720 - DNA, 23 bp, synthetic construct
  misc_feature 1..23: note = Synthetic: MUC16 reverse primer
  source 1..23: mol_type = other DNA
gcccttttctttcagcaactgat

SEQ ID NO: 1721 - DNA, 21 bp, synthetic construct
  misc_feature 1..21: note = Synthetic: MUC16 forward primer
  source 1..21: mol_type = other DNA
actggttccactgtggtctcc

SEQ ID NO: 1722 - DNA, 22 bp, synthetic construct
  misc_feature 1..22: note = Synthetic: MUC16 reverse primer
  source 1..22: mol_type = other DNA
atcatgagctccaaggaaccca

SEQ ID NO: 1723 - DNA, 23 bp, synthetic construct
  misc_feature 1..23: note = Synthetic: MUC16 forward primer
  source 1..23: mol_type = other DNA
ctcacagtggacctgatctctgg

SEQ ID NO: 1724 - DNA, 20 bp, synthetic construct
  misc_feature 1..20: note = Synthetic: MUC16 reverse primer
  source 1..20: mol_type = other DNA
caggaagcccagaaatgtct

SEQ ID NO: 1725 - DNA, 21 bp, synthetic construct
  misc_feature 1..21: note = Synthetic: MT1HL1 forward primer
  source 1..21: mol_type = other DNA
cacttttccgaagcccctttg

SEQ ID NO: 1726 - DNA, 17 bp, synthetic construct
  misc_feature 1..17: note = Synthetic: MT1HL1 reverse primer
  source 1..17: mol_type = other DNA
ctggaggctcctacgcc

SEQ ID NO: 1727 - DNA, 19 bp, synthetic construct
  misc_feature 1..19: note = Synthetic: MT1HL1 forward primer
  source 1..19: mol_type = other DNA
aggaggtgcatttgcactt

SEQ ID NO: 1728 - DNA, 20 bp, synthetic construct
  misc_feature 1..20: note = Synthetic: MT1HL1 reverse primer
  source 1..20: mol_type = other DNA
tcacctcggcttgcaatgga

SEQ ID NO: 1729 - DNA, 22 bp, synthetic construct
  misc_feature 1..22: note = Synthetic: MSLN forward primer
  source 1..22: mol_type = other DNA
agatgagccctgaggacattcg

SEQ ID NO: 1730 - DNA, 19 bp, synthetic construct
  misc_feature 1..19: note = Synthetic: MSLN reverse primer
  source 1..19: mol_type = other DNA
ggtcacctgaggactcatt

SEQ ID NO: 1731 - DNA, 22 bp, synthetic construct
  misc_feature 1..22: note = Synthetic: MSLN forward primer
  source 1..22: mol_type = other DNA
tgaagtcaacaaagggcacgaa

SEQ ID NO: 1732 - DNA, 22 bp, synthetic construct
  misc_feature 1..22: note = Synthetic: MSLN reverse primer
  source 1..22: mol_type = other DNA
tcccaatctcatgccacatgac

SEQ ID NO: 1733 - DNA, 25 bp, synthetic construct
  misc_feature 1..25: note = Synthetic: MROH9 forward primer
  source 1..25: mol_type = other DNA
tggtgttttctcctttgctaattca

SEQ ID NO: 1734 - DNA, 30 bp, synthetic construct
  misc_feature 1..30: note = Synthetic: MROH9 reverse primer
  source 1..30: mol_type = other DNA
tctactgagagcttatagagataactcagg

SEQ ID NO: 1735 - DNA, 28 bp, synthetic construct
  misc_feature 1..28: note = Synthetic: MROH9 forward primer
  source 1..28: mol_type = other DNA
gtgaatataactttccacagtttccgga

SEQ ID NO: 1736 - DNA, 24 bp, synthetic construct
  misc_feature 1..24: note = Synthetic: MROH9 reverse primer
  source 1..24: mol_type = other DNA
cagtgtcttctgaccttctaggac

SEQ ID NO: 1737 - DNA, 27 bp, synthetic construct
  misc_feature 1..27: note = Synthetic: MORC1 forward primer
  source 1..27: mol_type = other DNA
tgggaacagaaggaaaacttcaactct

SEQ ID NO: 1738 - DNA, 32 bp, synthetic construct
  misc_feature 1..32: note = Synthetic: MORC1 reverse primer
  source 1..32: mol_type = other DNA
gaaaagactttattctttttacgaagaaggaa

SEQ ID NO: 1739 - DNA, 17 bp, synthetic construct
  misc_feature 1..17: note = Synthetic: MORC1 forward primer
  source 1..17: mol_type = other DNA
acaggtcatcgtttctt

SEQ ID NO: 1740 - DNA, 29 bp, synthetic construct
  misc_feature 1..29: note = Synthetic: MORC1 reverse primer
  source 1..29: mol_type = other DNA
tgcctgtttcttcctttttagtatttgag

SEQ ID NO: 1741 - DNA, 25 bp, synthetic construct
  misc_feature 1..25: note = Synthetic: MMP16 forward primer
  source 1..25: mol_type = other DNA
ccacagggtcctatacaaaatgatt

SEQ ID NO: 1742 - DNA, 22 bp, synthetic construct
  misc_feature 1..22: note = Synthetic: MMP16 reverse primer
  source 1..22: mol_type = other DNA
ctcctagtatcgatgcagttta

SEQ ID NO: 1743 - DNA, 25 bp, synthetic construct
  misc_feature 1..25: note = Synthetic: MMP16 forward primer
  source 1..25: mol_type = other DNA
aacacaaaattcccgtcgctatttt

SEQ ID NO: 1744 - DNA, 27 bp, synthetic construct
  misc_feature 1..27: note = Synthetic: MMP16 reverse primer
  source 1..27: mol_type = other DNA
atggatggatacccaatgcaaattact

SEQ ID NO: 1745 - DNA, 25 bp, synthetic construct
  misc_feature 1..25: note = Synthetic: MMP16 forward primer
  source 1..25: mol_type = other DNA
gctcatctgagtcaaaatgggtatc

SEQ ID NO: 1746 - DNA, 30 bp, synthetic construct
  misc_feature 1..30: note = Synthetic: MMP16 reverse primer
  source 1..30: mol_type = other DNA
cgtgatgtggatataaccattatttttgca

SEQ ID NO: 1747 - DNA, 20 bp, synthetic construct
  misc_feature 1..20: note = Synthetic: MMP16 forward primer
  source 1..20: mol_type = other DNA
gagctgtccccatggaaacc

SEQ ID NO: 1748 - DNA, 25 bp, synthetic construct
  misc_feature 1..25: note = Synthetic: MMP16 reverse primer
  source 1..25: mol_type = other DNA
tctgacatttgaagaagttccctac

SEQ ID NO: 1749 - DNA, 17 bp, synthetic construct
  misc_feature 1..17: note = Synthetic: MKRN3 forward primer
  source 1..17: mol_type = other DNA
tggaggccctagcacgg

SEQ ID NO: 1750 - DNA, 20 bp, synthetic construct
  misc_feature 1..20: note = Synthetic: MKRN3 reverse primer
  source 1..20: mol_type = other DNA
aggaaagggaggatgcagcc

SEQ ID NO: 1751 - DNA, 19 bp, synthetic construct
  misc_feature 1..19: note = Synthetic: MKRN3 forward primer
  source 1..19: mol_type = other DNA
ctcaggaagtggcggaagc

SEQ ID NO: 1752 - DNA, 18 bp, synthetic construct
  misc_feature 1..18: note = Synthetic: MKRN3 reverse primer
  source 1..18: mol_type = other DNA
tcagcagccgagccaatc

SEQ ID NO: 1753 - DNA, 19 bp, synthetic construct
  misc_feature 1..19: note = Synthetic: MICAL3 forward primer
  source 1..19: mol_type = other DNA
ttccgcacctcctctctgg

SEQ ID NO: 1754 - DNA, 18 bp, synthetic construct
  misc_feature 1..18: note = Synthetic: MICAL3 reverse primer
  source 1..18: mol_type = other DNA
tgcggaggaagctcaggg

SEQ ID NO: 1755 - DNA, 24 bp, synthetic construct
  misc_feature 1..24: note = Synthetic: MGA forward primer
  source 1..24: mol_type = other DNA
agaggacaaagatccagtctactt

SEQ ID NO: 1756 - DNA, 25 bp, synthetic construct
  misc_feature 1..25: note = Synthetic: MGA reverse primer
  source 1..25: mol_type = other DNA
ggttgtctctggtcctctttttttc

SEQ ID NO: 1757 - DNA, 21 bp, synthetic construct
  misc_feature 1..21: note = Synthetic: MFAP5 forward primer
  source 1..21: mol_type = other DNA
gctatccaagggttcacctac

SEQ ID NO: 1758 - DNA, 22 bp, synthetic construct
  misc_feature 1..22: note = Synthetic: MFAP5 reverse primer
  source 1..22: mol_type = other DNA
ctgcagtcactcacatctcttt

SEQ ID NO: 1759 - DNA, 23 bp, synthetic construct
  misc_feature 1..23: note = Synthetic: MET forward primer
  source 1..23: mol_type = other DNA
actcctcatttggataggcttgt

SEQ ID NO: 1760 - DNA, 34 bp, synthetic construct
  misc_feature 1..34: note = Synthetic: MET reverse primer
  source 1..34: mol_type = other DNA
tatttctcagaacaataaactgaaatataccttc

SEQ ID NO: 1761 - DNA, 25 bp, synthetic construct
  misc_feature 1..25: note = Synthetic: MET forward primer
  source 1..25: mol_type = other DNA
gtagactaccgagctacttttccag

SEQ ID NO: 1762 - DNA, 25 bp, synthetic construct
  misc_feature 1..25: note = Synthetic: MET reverse primer
  source 1..25: mol_type = other DNA
cacaacccactgaggtatatgtata

SEQ ID NO: 1763 - DNA, 26 bp, synthetic construct
  misc_feature 1..26: note = Synthetic: MCTP1 forward primer
  source 1..26: mol_type = other DNA
ctccctaagatgatcaaccagaatac

SEQ ID NO: 1764 - DNA, 29 bp, synthetic construct
  misc_feature 1..29: note = Synthetic: MCTP1 reverse primer
  source 1..29: mol_type = other DNA
tgaagtttaaaatcggaggaaaagaagtt

SEQ ID NO: 1765 - DNA, 26 bp, synthetic construct
  misc_feature 1..26: note = Synthetic: MCTP1 forward primer
  source 1..26: mol_type = other DNA
acagggttgaggttcttgtgtattat

SEQ ID NO: 1766 - DNA, 25 bp, synthetic construct
  misc_feature 1..25: note = Synthetic: MCTP1 reverse primer
  source 1..25: mol_type = other DNA
tatttaacagggacgagtgatccat

SEQ ID NO: 1767 - DNA, 25 bp, synthetic construct
  misc_feature 1..25: note = Synthetic: MCHR2 forward primer
  source 1..25: mol_type = other DNA
ctacaggcaaattggttacaagtat

SEQ ID NO: 1768 - DNA, 27 bp, synthetic construct
  misc_feature 1..27: note = Synthetic: MCHR2 reverse primer
  source 1..27: mol_type = other DNA
aatgccttttcttattcaccaatgggc

SEQ ID NO: 1769 - DNA, 24 bp, synthetic construct
  misc_feature 1..24: note = Synthetic: MCC forward primer
  source 1..24: mol_type = other DNA
agacggtctatcttcttgttgagc

SEQ ID NO: 1770 - DNA, 20 bp, synthetic construct
  misc_feature 1..20: note = Synthetic: MCC reverse primer
  source 1..20: mol_type = other DNA
aggatgtccaggagcgaacg

SEQ ID NO: 1771 - DNA, 21 bp, synthetic construct
  misc_feature 1..21: note = Synthetic: MBD6 forward primer
  source 1..21: mol_type = other DNA
cccctaccctcatagctttaa

SEQ ID NO: 1772 - DNA, 21 bp, synthetic construct
  misc_feature 1..21: note = Synthetic: MBD6 reverse primer
  source 1..21: mol_type = other DNA
ttctgtcccacctactcaccc

SEQ ID NO: 1773 - DNA, 20 bp, synthetic construct
  misc_feature 1..20: note = Synthetic: MB21D2 forward primer
  source 1..20: mol_type = other DNA
ccgggacagcagtttaatga

SEQ ID NO: 1774 - DNA, 21 bp, synthetic construct
  misc_feature 1..21: note = Synthetic: MB21D2 reverse primer
  source 1..21: mol_type = other DNA
ggtgcagttgaagaagtgcat

SEQ ID NO: 1775 - DNA, 20 bp, synthetic construct
  misc_feature 1..20: note = Synthetic: MB21D2 forward primer
  source 1..20: mol_type = other DNA
ctgataggcctgcatgaggc

SEQ ID NO: 1776 - DNA, 22 bp, synthetic construct
  misc_feature 1..22: note = Synthetic: MB21D2 reverse primer
  source 1..22: mol_type = other DNA
tgcttgctcctacaagggtaag

SEQ ID NO: 1777 - DNA, 26 bp, synthetic construct
  misc_feature 1..26: note = Synthetic: MARK1 forward primer
  source 1..26: mol_type = other DNA
agacaaggaagagggtaaagattcta

SEQ ID NO: 1778 - DNA, 26 bp, synthetic construct
  misc_feature 1..26: note = Synthetic: MARK1 reverse primer
  source 1..26: mol_type = other DNA
atcatgtcattagggtccattgaact

SEQ ID NO: 1779 - DNA, 21 bp, synthetic construct
  misc_feature 1..21: note = Synthetic: MARK1 forward primer
  source 1..21: mol_type = other DNA
ttctttgcggttcacatggag

SEQ ID NO: 1780 - DNA, 31 bp, synthetic construct
  misc_feature 1..31: note = Synthetic: MARK1 reverse primer
  source 1..31: mol_type = other DNA
tcataatcacagttatttgcatctaacactt

SEQ ID NO: 1781 - DNA, 19 bp, synthetic construct
  misc_feature 1..19: note = Synthetic: MARCO forward primer
  source 1..19: mol_type = other DNA
aagagcccgcacttaccca

SEQ ID NO: 1782 - DNA, 19 bp, synthetic construct
  misc_feature 1..19: note = Synthetic: MARCO reverse primer
  source 1..19: mol_type = other DNA
ccggcctcggttactactg

SEQ ID NO: 1783 - DNA, 22 bp, synthetic construct
  misc_feature 1..22: note = Synthetic: MARCO forward primer
  source 1..22: mol_type = other DNA
acccaggtgaaaactcagtgtc

SEQ ID NO: 1784 - DNA, 23 bp, synthetic construct
  misc_feature 1..23: note = Synthetic: MARCO reverse primer
  source 1..23: mol_type = other DNA
cccaggtaccactgtagtaaact

SEQ ID NO: 1785 - DNA, 28 bp, synthetic construct
  misc_feature 1..28: note = Synthetic: MAP3K1 forward primer
  source 1..28: mol_type = other DNA
ataattatttctattgtcttataggggg

SEQ ID NO: 1786 - DNA, 30 bp, synthetic construct
  misc_feature 1..30: note = Synthetic: MAP3K1 reverse primer
  source 1..30: mol_type = other DNA
gagtaactgttcagtgtagttaataactac

SEQ ID NO: 1787 - DNA, 22 bp, synthetic construct
  misc_feature 1..22: note = Synthetic: MAP3K1 forward primer
  source 1..22: mol_type = other DNA
gtggctcatttgctgagtaaat

SEQ ID NO: 1788 - DNA, 28 bp, synthetic construct
  misc_feature 1..28: note = Synthetic: MAP3K1 reverse primer
  source 1..28: mol_type = other DNA
tttggttttcatggagatacgaaaggcc

SEQ ID NO: 1789 - DNA, 22 bp, synthetic construct
  misc_feature 1..22: note = Synthetic: MAP2K1 forward primer
  source 1..22: mol_type = other DNA
tggaggagctagagcttgatga

SEQ ID NO: 1790 - DNA, 21 bp, synthetic construct
  misc_feature 1..21: note = Synthetic: MAP2K1 reverse primer
  source 1..21: mol_type = other DNA
cagttctcccaccttctgctt

SEQ ID NO: 1791 - DNA, 21 bp, synthetic construct
  misc_feature 1..21: note = Synthetic: MAP2K1 forward primer
  source 1..21: mol_type = other DNA
ttgaggcctttcttacccaga

SEQ ID NO: 1792 - DNA, 20 bp, synthetic construct
  misc_feature 1..20: note = Synthetic: MAP2K1 reverse primer
  source 1..20: mol_type = other DNA
gaacaccacaccgccattgc

SEQ ID NO: 1793 - DNA, 22 bp, synthetic construct
  misc_feature 1..22: note = Synthetic: MAP2K1 forward primer
  source 1..22: mol_type = other DNA
ggagatcaaacccgcaatccgg

SEQ ID NO: 1794 - DNA, 21 bp, synthetic construct
  misc_feature 1..21: note = Synthetic: MAP2K1 reverse primer
  source 1..21: mol_type = other DNA
cgctgtagaacgcaccataga

SEQ ID NO: 1795 - DNA, 21 bp, synthetic construct
  misc_feature 1..21: note = Synthetic: MAP2K1 forward primer
  source 1..21: mol_type = other DNA
gcaactctccgtacatcgtgg

SEQ ID NO: 1796 - DNA, 23 bp, synthetic construct
  misc_feature 1..23: note = Synthetic: MAP2K1 reverse primer
  source 1..23: mol_type = other DNA
taccatgtgctccatgcagatac

SEQ ID NO: 1797 - DNA, 24 bp, synthetic construct
  misc_feature 1..24: note = Synthetic: MAP2 forward primer
  source 1..24: mol_type = other DNA
tgtagaaagcaaagaggaagaaca

SEQ ID NO: 1798 - DNA, 29 bp, synthetic construct
  misc_feature 1..29: note = Synthetic: MAP2 reverse primer
  source 1..29: mol_type = other DNA
atgacagtaccatttttgtaaaaatcttt

SEQ ID NO: 1799 - DNA, 28 bp, synthetic construct
  misc_feature 1..28: note = Synthetic: MAP2 forward primer
  source 1..28: mol_type = other DNA
gatatcatgtgagtctcctttcctagcc

SEQ ID NO: 1800 - DNA, 23 bp, synthetic construct
  misc_feature 1..23: note = Synthetic: MAP2 reverse primer
  source 1..23: mol_type = other DNA
ctgccagatctagcatttcagga

SEQ ID NO: 1801 - DNA, 27 bp, synthetic construct
  misc_feature 1..27: note = Synthetic: MAMDC2 forward primer
  source 1..27: mol_type = other DNA
ctgcgttttcattatgccatctatgga

SEQ ID NO: 1802 - DNA, 22 bp, synthetic construct
  misc_feature 1..22: note = Synthetic: MAMDC2 reverse primer
  source 1..22: mol_type = other DNA
actccaacacagaccagatctt

SEQ ID NO: 1803 - DNA, 20 bp, synthetic construct
  misc_feature 1..20: note = Synthetic: MAMDC2 forward primer
  source 1..20: mol_type = other DNA
aaggggtgtttggatgcaag

SEQ ID NO: 1804 - DNA, 23 bp, synthetic construct
  misc_feature 1..23: note = Synthetic: MAMDC2 reverse primer
  source 1..23: mol_type = other DNA
actgaacatggacacaggagaaa

SEQ ID NO: 1805 - DNA, 24 bp, synthetic construct
  misc_feature 1..24: note = Synthetic: MAGEC3 forward primer
  source 1..24: mol_type = other DNA
cccctgatatttgacctgagtagc

SEQ ID NO: 1806 - DNA, 21 bp, synthetic construct
  misc_feature 1..21: note = Synthetic: MAGEC3 reverse primer
  source 1..21: mol_type = other DNA
cctcagatgcccaagatgaaa

SEQ ID NO: 1807 - DNA, 22 bp, synthetic construct
  misc_feature 1..22: note = Synthetic: MAGEC3 forward primer
  source 1..22: mol_type = other DNA
aaaaaggccacagataaggact

SEQ ID NO: 1808 - DNA, 22 bp, synthetic construct
  misc_feature 1..22: note = Synthetic: MAGEC3 reverse primer
  source 1..22: mol_type = other DNA
aagttccacccctcagaaaaag

SEQ ID NO: 1809 - DNA, 18 bp, synthetic construct
  misc_feature 1..18: note = Synthetic: MAGEC1 forward primer
  source 1..18: mol_type = other DNA
tgaggggatgcactccca

SEQ ID NO: 1810 - DNA, 24 bp, synthetic construct
  misc_feature 1..24: note = Synthetic: MAGEC1 reverse primer
  source 1..24: mol_type = other DNA
atttggagaggagacagggaatcc

SEQ ID NO: 1811 - DNA, 21 bp, synthetic construct
  misc_feature 1..21: note = Synthetic: MAGEC1 forward primer
  source 1..21: mol_type = other DNA
agagtcctgagagtgctcctg

SEQ ID NO: 1812 - DNA, 18 bp, synthetic construct
  misc_feature 1..18: note = Synthetic: MAGEC1 reverse primer
  source 1..18: mol_type = other DNA
agagaagacagggagtcc

SEQ ID NO: 1813 - DNA, 23 bp, synthetic construct
  misc_feature 1..23: note = Synthetic: MAGEC1 forward primer
  source 1..23: mol_type = other DNA
gacagcgagtccttgatagagag

SEQ ID NO: 1814 - DNA, 19 bp, synthetic construct
  misc_feature 1..19: note = Synthetic: MAGEC1 reverse primer
  source 1..19: mol_type = other DNA
aagaaaccgcgccaactcg

SEQ ID NO: 1815 - DNA, 23 bp, synthetic construct
  misc_feature 1..23: note = Synthetic: MAGEC1 forward primer
  source 1..23: mol_type = other DNA
gagcccttgttcacttatacact

SEQ ID NO: 1816 - DNA, 23 bp, synthetic construct
  misc_feature 1..23: note = Synthetic: MAGEC1 reverse primer
  source 1..23: mol_type = other DNA
ctttgtgataggctgcttcactt

SEQ ID NO: 1817 - DNA, 22 bp, synthetic construct
  misc_feature 1..22: note = Synthetic: MAGEC1 forward primer
  source 1..22: mol_type = other DNA
gatgtgctgagtggaatagggg

SEQ ID NO: 1818 - DNA, 23 bp, synthetic construct
  misc_feature 1..23: note = Synthetic: MAGEC1 reverse primer
  source 1..23: mol_type = other DNA
caaactttagtgaggagctccct

SEQ ID NO: 1819 - DNA, 19 bp, synthetic construct
  misc_feature 1..19: note = Synthetic: MAGEC1 forward primer
  source 1..19: mol_type = other DNA
agggagcactttgcctttg

SEQ ID NO: 1820 - DNA, 23 bp, synthetic construct
  misc_feature 1..23: note = Synthetic: MAGEC1 reverse primer
  source 1..23: mol_type = other DNA
tcccggtactctaggtaatgttc

SEQ ID NO: 1821 - DNA, 25 bp, synthetic construct
  misc_feature 1..25: note = Synthetic: LRRTM4 forward primer
  source 1..25: mol_type = other DNA
atcttcatccactgagctaatgtaa

SEQ ID NO: 1822 - DNA, 23 bp, synthetic construct
  misc_feature 1..23: note = Synthetic: LRRTM4 reverse primer
  source 1..23: mol_type = other DNA
agggtcacaaggcttatcattaa

SEQ ID NO: 1823 - DNA, 23 bp, synthetic construct
  misc_feature 1..23: note = Synthetic: LRRTM4 forward primer
  source 1..23: mol_type = other DNA
cttctgaatgctgttgaacctta

SEQ ID NO: 1824 - DNA, 24 bp, synthetic construct
  misc_feature 1..24: note = Synthetic: LRRTM4 reverse primer
  source 1..24: mol_type = other DNA
ctcatgctttcgcagatatccctg

SEQ ID NO: 1825 - DNA, 21 bp, synthetic construct
  misc_feature 1..21: note = Synthetic: LRRTM1 forward primer
  source 1..21: mol_type = other DNA
acggagcagatgtgattgtga

SEQ ID NO: 1826 - DNA, 20 bp, synthetic construct
  misc_feature 1..20: note = Synthetic: LRRTM1 reverse primer
  source 1..20: mol_type = other DNA
acaacagcctctcggagctg

SEQ ID NO: 1827 - DNA, 20 bp, synthetic construct
  misc_feature 1..20: note = Synthetic: LRRTM1 forward primer
  source 1..20: mol_type = other DNA
ctgcattaaccccgtgaact

SEQ ID NO: 1828 - DNA, 18 bp, synthetic construct
  misc_feature 1..18: note = Synthetic: LRRTM1 reverse primer
  source 1..18: mol_type = other DNA
ctgcgaggcgctcaacct

SEQ ID NO: 1829 - DNA, 24 bp, synthetic construct
  misc_feature 1..24: note = Synthetic: LRRK2 forward primer
  source 1..24: mol_type = other DNA
aaggttgtccaaaacaccctaagg

SEQ ID NO: 1830 - DNA, 28 bp, synthetic construct
  misc_feature 1..28: note = Synthetic: LRRK2 reverse primer
  source 1..28: mol_type = other DNA
caatctggaatttttctaggagcttaaa

SEQ ID NO: 1831 - DNA, 34 bp, synthetic construct
  misc_feature 1..34: note = Synthetic: LRRIQ3 forward primer
  source 1..34: mol_type = other DNA
ttcttttgttctgtgtaatatttgtcaatatcac

SEQ ID NO: 1832 - DNA, 33 bp, synthetic construct
  misc_feature 1..33: note = Synthetic: LRRIQ3 reverse primer
  source 1..33: mol_type = other DNA
tatactactcatccaaagccaatcattaaaaaa

SEQ ID NO: 1833 - DNA, 23 bp, synthetic construct
  misc_feature 1..23: note = Synthetic: LRRIQ3 forward primer
  source 1..23: mol_type = other DNA
actccgctccaatcgtatgtctt

SEQ ID NO: 1834 - DNA, 28 bp, synthetic construct
  misc_feature 1..28: note = Synthetic: LRRIQ3 reverse primer
  source 1..28: mol_type = other DNA
cttcaggttcattgaagaataatgcagt

SEQ ID NO: 1835 - DNA, 23 bp, synthetic construct
  misc_feature 1..23: note = Synthetic: LRRC7 forward primer
  source 1..23: mol_type = other DNA
tggatgatgagatgctcacctac

SEQ ID NO: 1836 - DNA, 24 bp, synthetic construct
  misc_feature 1..24: note = Synthetic: LRRC7 reverse primer
  source 1..24: mol_type = other DNA
cttccactgatccttgaggattga

SEQ ID NO: 1837 - DNA, 26 bp, synthetic construct
  misc_feature 1..26: note = Synthetic: LRRC7 forward primer
  source 1..26: mol_type = other DNA
aagtctatcagtttgaccaaagcttc

SEQ ID NO: 1838 - DNA, 21 bp, synthetic construct
  misc_feature 1..21: note = Synthetic: LRRC7 reverse primer
  source 1..21: mol_type = other DNA
ggtggtatcctcttttcggct

SEQ ID NO: 1839 - DNA, 21 bp, synthetic construct
  misc_feature 1..21: note = Synthetic: LRP1B forward primer
  source 1..21: mol_type = other DNA
tggttctaaagcgctgctttc

SEQ ID NO: 1840 - DNA, 25 bp, synthetic construct
  misc_feature 1..25: note = Synthetic: LRP1B reverse primer
  source 1..25: mol_type = other DNA
ctgtgtttcttcaaggttttggtgt

SEQ ID NO: 1841 - DNA, 25 bp, synthetic construct
  misc_feature 1..25: note = Synthetic: LRP1B forward primer
  source 1..25: mol_type = other DNA
tctgcacagtcaaaatctccatcac

SEQ ID NO: 1842 - DNA, 24 bp, synthetic construct
  misc_feature 1..24: note = Synthetic: LRP1B reverse primer
  source 1..24: mol_type = other DNA
gagccacagacatgtacattgaaa

SEQ ID NO: 1843 - DNA, 28 bp, synthetic construct
  misc_feature 1..28: note = Synthetic: LRP1B forward primer
  source 1..28: mol_type = other DNA
actgtatattctgcacagaaccttaact

SEQ ID NO: 1844 - DNA, 21 bp, synthetic construct
  misc_feature 1..21: note = Synthetic: LRP1B reverse primer
  source 1..21: mol_type = other DNA
gtgtgatggaattcatgactg

SEQ ID NO: 1845 - DNA, 23 bp, synthetic construct
  misc_feature 1..23: note = Synthetic: LRP1B forward primer
  source 1..23: mol_type = other DNA
acagttctcttcatcactgccat

SEQ ID NO: 1846 - DNA, 27 bp, synthetic construct
  misc_feature 1..27: note = Synthetic: LRP1B reverse primer
  source 1..27: mol_type = other DNA
gtgcaaaaataaagcccactgtattcc

SEQ ID NO: 1847 - DNA, 29 bp, synthetic construct
  misc_feature 1..29: note = Synthetic: LRP1B forward primer
  source 1..29: mol_type = other DNA
gtaaaccaatttgttgactaggtctagtg

SEQ ID NO: 1848 - DNA, 24 bp, synthetic construct
  misc_feature 1..24: note = Synthetic: LRP1B reverse primer
  source 1..24: mol_type = other DNA
tgtgacatggatgggatgaaccga

SEQ ID NO: 1849 - DNA, 22 bp, synthetic construct
  misc_feature 1..22: note = Synthetic: LRP1B forward primer
  source 1..22: mol_type = other DNA
ggctgctctgtctttgaatcaa

SEQ ID NO: 1850 - DNA, 21 bp, synthetic construct
  misc_feature 1..21: note = Synthetic: LRP1B reverse primer
  source 1..21: mol_type = other DNA
acgggaatgtcgccaaagtgg

SEQ ID NO: 1851 - DNA, 29 bp, synthetic construct
  misc_feature 1..29: note = Synthetic: LRP1B forward primer
  source 1..29: mol_type = other DNA
ggaaaaggtatggactttcaaatatacaa

SEQ ID NO: 1852 - DNA, 24 bp, synthetic construct
  misc_feature 1..24: note = Synthetic: LRP1B reverse primer
  source 1..24: mol_type = other DNA
tcagtttaatccaggcggaatttt

SEQ ID NO: 1853 - DNA, 23 bp, synthetic construct
  misc_feature 1..23: note = Synthetic: LRP1B forward primer
  source 1..23: mol_type = other DNA
ttttctctgccatggatcctttt

SEQ ID NO: 1854 - DNA, 32 bp, synthetic construct
  misc_feature 1..32: note = Synthetic: LRP1B reverse primer
  source 1..32: mol_type = other DNA
aacaaatttctcatattgaacataattcaaga

SEQ ID NO: 1855 - DNA, 33 bp, synthetic construct
  misc_feature 1..33: note = Synthetic: LRP1B forward primer
  source 1..33: mol_type = other DNA
tgagtactccaaataatcatatctctttgataa

SEQ ID NO: 1856 - DNA, 31 bp, synthetic construct
  misc_feature 1..31: note = Synthetic: LRP1B reverse primer
  source 1..31: mol_type = other DNA
taatgacactgatatcctgggttttatatat

SEQ ID NO: 1857 - DNA, 23 bp, synthetic construct
  misc_feature 1..23: note = Synthetic: LRP1B forward primer
  source 1..23: mol_type = other DNA
accctaggagcgttgtctaacaa

SEQ ID NO: 1858 - DNA, 23 bp, synthetic construct
  misc_feature 1..23: note = Synthetic: LRP1B reverse primer
  source 1..23: mol_type = other DNA
gggagtagtggactatcaaggaa

SEQ ID NO: 1859 - DNA, 23 bp, synthetic construct
  misc_feature 1..23: note = Synthetic: LRP1B forward primer
  source 1..23: mol_type = other DNA
ctgccttgaatgacagtgtgtct

SEQ ID NO: 1860 - DNA, 29 bp, synthetic construct
  misc_feature 1..29: note = Synthetic: LRP1B reverse primer
  source 1..29: mol_type = other DNA
ctgggtagatctttacttggactatgtgg

SEQ ID NO: 1861 - DNA, 34 bp, synthetic construct
  misc_feature 1..34: note = Synthetic: LRP1B forward primer
  source 1..34: mol_type = other DNA
tgtagattacccaaaatattaatctgagaaactt

SEQ ID NO: 1862 - DNA, 27 bp, synthetic construct
  misc_feature 1..27: note = Synthetic: LRP1B reverse primer
  source 1..27: mol_type = other DNA
ggatatttttagatgctccaccaactg

SEQ ID NO: 1863 - DNA, 20 bp, synthetic construct
  misc_feature 1..20: note = Synthetic: LRP1B forward primer
  source 1..20: mol_type = other DNA
tggcctttcacactgtgtgc

SEQ ID NO: 1864 - DNA, 23 bp, synthetic construct
  misc_feature 1..23: note = Synthetic: LRP1B reverse primer
  source 1..23: mol_type = other DNA
ctgggctttgttattcgctgatc

SEQ ID NO: 1865 - DNA, 25 bp, synthetic construct
  misc_feature 1..25: note = Synthetic: LRP1B forward primer
  source 1..25: mol_type = other DNA
ctttgattgtgagggttctgtgatg

SEQ ID NO: 1866 - DNA, 18 bp, synthetic construct
  misc_feature 1..18: note = Synthetic: LRP1B reverse primer
  source 1..18: mol_type = other DNA
gccgcccatctacctaaa

SEQ ID NO: 1867 - DNA, 20 bp, synthetic construct
  misc_feature 1..20: note = Synthetic: LRP1B forward primer
  source 1..20: mol_type = other DNA
ctcaccccagcagttagtgg

SEQ ID NO: 1868 - DNA, 20 bp, synthetic construct
  misc_feature 1..20: note = Synthetic: LRP1B reverse primer
  source 1..20: mol_type = other DNA
gacccagtgctttcaagctt

SEQ ID NO: 1869 - DNA, 26 bp, synthetic construct
  misc_feature 1..26: note = Synthetic: LRP1B forward primer
  source 1..26: mol_type = other DNA
agcagttctttcctttcatcaacact

SEQ ID NO: 1870 - DNA, 28 bp, synthetic construct
  misc_feature 1..28: note = Synthetic: LRP1B reverse primer
  source 1..28: mol_type = other DNA
caacaaattactccaatccggtatatgc

SEQ ID NO: 1871 - DNA, 22 bp, synthetic construct
  misc_feature 1..22: note = Synthetic: LRP1B forward primer
  source 1..22: mol_type = other DNA
ttcgacagttttgcccatccat

SEQ ID NO: 1872 - DNA, 31 bp, synthetic construct
  misc_feature 1..31: note = Synthetic: LRP1B reverse primer
  source 1..31: mol_type = other DNA
aggaagtaaataattaatgtggccaagacca

SEQ ID NO: 1873 - DNA, 23 bp, synthetic construct
  misc_feature 1..23: note = Synthetic: LRP1B forward primer
  source 1..23: mol_type = other DNA
acaagtccgagttttgtaactgc

SEQ ID NO: 1874 - DNA, 21 bp, synthetic construct
  misc_feature 1..21: note = Synthetic: LRP1B reverse primer
  source 1..21: mol_type = other DNA
tgcatgtgaagtcgatccata

SEQ ID NO: 1875 - DNA, 17 bp, synthetic construct
  misc_feature 1..17: note = Synthetic: LRP1B forward primer
  source 1..17: mol_type = other DNA
ccctggcattccatatg

SEQ ID NO: 1876 - DNA, 25 bp, synthetic construct
  misc_feature 1..25: note = Synthetic: LRP1B reverse primer
  source 1..25: mol_type = other DNA
ttgaatttcacgcatgctgtttttt

SEQ ID NO: 1877 - DNA, 21 bp, synthetic construct
  misc_feature 1..21: note = Synthetic: LRP1B forward primer
  source 1..21: mol_type = other DNA
tgccggccaattaggaaactg

SEQ ID NO: 1878 - DNA, 28 bp, synthetic construct
  misc_feature 1..28: note = Synthetic: LRP1B reverse primer
  source 1..28: mol_type = other DNA
gatgaatacatgatccccatagaaaatc

SEQ ID NO: 1879 - DNA, 23 bp, synthetic construct
  misc_feature 1..23: note = Synthetic: LRP1B forward primer
  source 1..23: mol_type = other DNA
tctaaagcacgagggtttaccag

SEQ ID NO: 1880 - DNA, 21 bp, synthetic construct
  misc_feature 1..21: note = Synthetic: LRP1B reverse primer
  source 1..21: mol_type = other DNA
cccaggaattgttagaggaat

SEQ ID NO: 1881 - DNA, 30 bp, synthetic construct
  misc_feature 1..30: note = Synthetic: LRP1B forward primer
  source 1..30: mol_type = other DNA
tagtcaaatattgcatacccattaactgga

SEQ ID NO: 1882 - DNA, 24 bp, synthetic construct
  misc_feature 1..24: note = Synthetic: LRP1B reverse primer
  source 1..24: mol_type = other DNA
gaagactcttttagagggtgaaat

SEQ ID NO: 1883 - DNA, 21 bp, synthetic construct
  misc_feature 1..21: note = Synthetic: LRP1B forward primer
  source 1..21: mol_type = other DNA
caccacaattcctctgggatg

SEQ ID NO: 1884 - DNA, 21 bp, synthetic construct
  misc_feature 1..21: note = Synthetic: LRP1B reverse primer
  source 1..21: mol_type = other DNA
accattaatgtggccaggctg

SEQ ID NO: 1885 - DNA, 22 bp, synthetic construct
  misc_feature 1..22: note = Synthetic: LRP1B forward primer
  source 1..22: mol_type = other DNA
catcgtcgccatcacatttcca

SEQ ID NO: 1886 - DNA, 26 bp, synthetic construct
  misc_feature 1..26: note = Synthetic: LRP1B reverse primer
  source 1..26: mol_type = other DNA
actacctcacatatgtaaagctggag

SEQ ID NO: 1887 - DNA, 22 bp, synthetic construct
  misc_feature 1..22: note = Synthetic: LRP1B forward primer
  source 1..22: mol_type = other DNA
tgtctgtttttgcagcgaaact

SEQ ID NO: 1888 - DNA, 27 bp, synthetic construct
  misc_feature 1..27: note = Synthetic: LRP1B reverse primer
  source 1..27: mol_type = other DNA
gactgactgtagctagcattattcata

SEQ ID NO: 1889 - DNA, 25 bp, synthetic construct
  misc_feature 1..25: note = Synthetic: LRP1B forward primer
  source 1..25: mol_type = other DNA
cttcattgctcccacagtcattagc

SEQ ID NO: 1890 - DNA, 26 bp, synthetic construct
  misc_feature 1..26: note = Synthetic: LRP1B reverse primer
  source 1..26: mol_type = other DNA
tgtcctgatgatcagtttaaatgcca

SEQ ID NO: 1891 - DNA, 21 bp, synthetic construct
  misc_feature 1..21: note = Synthetic: LRP1B forward primer
  source 1..21: mol_type = other DNA
ttggggatgcagcgattattc

SEQ ID NO: 1892 - DNA, 22 bp, synthetic construct
  misc_feature 1..22: note = Synthetic: LRP1B reverse primer
  source 1..22: mol_type = other DNA
tccctcccagtcaatcatagct

SEQ ID NO: 1893 - DNA, 25 bp, synthetic construct
  misc_feature 1..25: note = Synthetic: LRP1B forward primer
  source 1..25: mol_type = other DNA
catccagcttccaaccttcataaca

SEQ ID NO: 1894 - DNA, 31 bp, synthetic construct
  misc_feature 1..31: note = Synthetic: LRP1B reverse primer
  source 1..31: mol_type = other DNA
aagacaataaaacatgtgaaattgtggatta

SEQ ID NO: 1895 - DNA, 24 bp, synthetic construct
  misc_feature 1..24: note = Synthetic: LRP1B forward primer
  source 1..24: mol_type = other DNA
tcacatacttggctgcactttaga

SEQ ID NO: 1896 - DNA, 21 bp, synthetic construct
  misc_feature 1..21: note = Synthetic: LRP1B reverse primer
  source 1..21: mol_type = other DNA
tgccctgaaggacttcaactc

SEQ ID NO: 1897 - DNA, 23 bp, synthetic construct
  misc_feature 1..23: note = Synthetic: LRP1B forward primer
  source 1..23: mol_type = other DNA
tccactttcagaaagctttcccc

SEQ ID NO: 1898 - DNA, 30 bp, synthetic construct
  misc_feature 1..30: note = Synthetic: LRP1B reverse primer
  source 1..30: mol_type = other DNA
caaaagagactatagtctacttgttcctgg

SEQ ID NO: 1899 - DNA, 29 bp, synthetic construct
  misc_feature 1..29: note = Synthetic: LRP1B forward primer
  source 1..29: mol_type = other DNA
gaaaatcaagtgctattgtgtttctcaat

SEQ ID NO: 1900 - DNA, 30 bp, synthetic construct
  misc_feature 1..30: note = Synthetic: LRP1B reverse primer
  source 1..30: mol_type = other DNA
ttcatcatcttttctattcgtcatgagatc

SEQ ID NO: 1901 - DNA, 25 bp, synthetic construct
  misc_feature 1..25: note = Synthetic: LRP1B forward primer
  source 1..25: mol_type = other DNA
cgcagtcattttctccatcacataa

SEQ ID NO: 1902 - DNA, 24 bp, synthetic construct
  misc_feature 1..24: note = Synthetic: LRP1B reverse primer
  source 1..24: mol_type = other DNA
gaaaacagaagctgtcgaagaggc

SEQ ID NO: 1903 - DNA, 21 bp, synthetic construct
  misc_feature 1..21: note = Synthetic: LRP1B forward primer
  source 1..21: mol_type = other DNA
atgcagcggcgattatagcat

SEQ ID NO: 1904 - DNA, 34 bp, synthetic construct
  misc_feature 1..34: note = Synthetic: LRP1B reverse primer
  source 1..34: mol_type = other DNA
agtcattatgaatgaaatattatctgtgattttc

SEQ ID NO: 1905 - DNA, 34 bp, synthetic construct
  misc_feature 1..34: note = Synthetic: LRP1B forward primer
  source 1..34: mol_type = other DNA
gtaatatttagttaccttaatgtcacttccattt

SEQ ID NO: 1906 - DNA, 32 bp, synthetic construct
  misc_feature 1..32: note = Synthetic: LRP1B reverse primer
  source 1..32: mol_type = other DNA
gagaagaattcatctattggatcgattctagc

SEQ ID NO: 1907 - DNA, 25 bp, synthetic construct
  misc_feature 1..25: note = Synthetic: LRP1B forward primer
  source 1..25: mol_type = other DNA
acattctatttatgcgactgccatt

SEQ ID NO: 1908 - DNA, 32 bp, synthetic construct
  misc_feature 1..32: note = Synthetic: LRP1B reverse primer
  source 1..32: mol_type = other DNA
gggattaaacaatgttattgctatagactttg

SEQ ID NO: 1909 - DNA, 26 bp, synthetic construct
  misc_feature 1..26: note = Synthetic: LRP1B forward primer
  source 1..26: mol_type = other DNA
tacaagccattgagtttggatacttc

SEQ ID NO: 1910 - DNA, 20 bp, synthetic construct
  misc_feature 1..20: note = Synthetic: LRP1B reverse primer
  source 1..20: mol_type = other DNA
acacagcggtccccaatgca

SEQ ID NO: 1911 - DNA, 24 bp, synthetic construct
  misc_feature 1..24: note = Synthetic: LRP1B forward primer
  source 1..24: mol_type = other DNA
ttccaatccaatcgacagcaagtg

SEQ ID NO: 1912 - DNA, 31 bp, synthetic construct
  misc_feature 1..31: note = Synthetic: LRP1B reverse primer
  source 1..31: mol_type = other DNA
cttattttagggatttacgctgttaaccttt

SEQ ID NO: 1913 - DNA, 20 bp, synthetic construct
  misc_feature 1..20: note = Synthetic: LRFN5 forward primer
  source 1..20: mol_type = other DNA
ctgagcctgcaattcactgg

SEQ ID NO: 1914 - DNA, 25 bp, synthetic construct
  misc_feature 1..25: note = Synthetic: LRFN5 reverse primer
  source 1..25: mol_type = other DNA
agtgttccgttatcatacaccagag

SEQ ID NO: 1915 - DNA, 27 bp, synthetic construct
  misc_feature 1..27: note = Synthetic: LRFN5 forward primer
  source 1..27: mol_type = other DNA
cctgaagggaagcttatttcaaatgca

SEQ ID NO: 1916 - DNA, 24 bp, synthetic construct
  misc_feature 1..24: note = Synthetic: LRFN5 reverse primer
  source 1..24: mol_type = other DNA
attggaagcaatgcaggtaaaagc

SEQ ID NO: 1917 - DNA, 22 bp, synthetic construct
  misc_feature 1..22: note = Synthetic: LRFN5 forward primer
  source 1..22: mol_type = other DNA
atctgtccaaagcgttgtgtct

SEQ ID NO: 1918 - DNA, 25 bp, synthetic construct
  misc_feature 1..25: note = Synthetic: LRFN5 reverse primer
  source 1..25: mol_type = other DNA
ctgtcaatgtttggtggaacaaata

SEQ ID NO: 1919 - DNA, 21 bp, synthetic construct
  misc_feature 1..21: note = Synthetic: LRFN5 forward primer
  source 1..21: mol_type = other DNA
caaccctttgtgccaagaaag

SEQ ID NO: 1920 - DNA, 25 bp, synthetic construct
  misc_feature 1..25: note = Synthetic: LRFN5 reverse primer
  source 1..25: mol_type = other DNA
gtaacaaaattgtctgccaaccgca

SEQ ID NO: 1921 - DNA, 24 bp, synthetic construct
  misc_feature 1..24: note = Synthetic: LPHN3 forward primer
  source 1..24: mol_type = other DNA
gtccttatttatccacggagaatg

SEQ ID NO: 1922 - DNA, 26 bp, synthetic construct
  misc_feature 1..26: note = Synthetic: LPHN3 reverse primer
  source 1..26: mol_type = other DNA
cgtaataacaggggaattgacaataa

SEQ ID NO: 1923 - DNA, 23 bp, synthetic construct
  misc_feature 1..23: note = Synthetic: LPHN3 forward primer
  source 1..23: mol_type = other DNA
acggaagctttgtccacaaatca

SEQ ID NO: 1924 - DNA, 25 bp, synthetic construct
  misc_feature 1..25: note = Synthetic: LPHN3 reverse primer
  source 1..25: mol_type = other DNA
ccacaggatcagccaaataaacctt

SEQ ID NO: 1925 - DNA, 25 bp, synthetic construct
  misc_feature 1..25: note = Synthetic: LPHN3 forward primer
  source 1..25: mol_type = other DNA
tgtgaaaattcactgcatcatgagt

SEQ ID NO: 1926 - DNA, 28 bp, synthetic construct
  misc_feature 1..28: note = Synthetic: LPHN3 reverse primer
  source 1..28: mol_type = other DNA
tccagtaataaaggaagactctgactgc

SEQ ID NO: 1927 - DNA, 23 bp, synthetic construct
  misc_feature 1..23: note = Synthetic: LPHN3 forward primer
  source 1..23: mol_type = other DNA
gtagaatgtggaatgacacggtt

SEQ ID NO: 1928 - DNA, 22 bp, synthetic construct
  misc_feature 1..22: note = Synthetic: LPHN3 reverse primer
  source 1..22: mol_type = other DNA
ctgttgagtgacgctgaactgt

SEQ ID NO: 1929 - DNA, 19 bp, synthetic construct
  misc_feature 1..19: note = Synthetic: LHX1 forward primer
  source 1..19: mol_type = other DNA
tctgcactccatgtcggcc

SEQ ID NO: 1930 - DNA, 18 bp, synthetic construct
  misc_feature 1..18: note = Synthetic: LHX1 reverse primer
  source 1..18: mol_type = other DNA
cctcgttcatttcggggg

SEQ ID NO: 1931 - DNA, 34 bp, synthetic construct
  misc_feature 1..34: note = Synthetic: LEPR forward primer
  source 1..34: mol_type = other DNA
aatctcagatactttctattcatgtcttagtcaa

SEQ ID NO: 1932 - DNA, 26 bp, synthetic construct
  misc_feature 1..26: note = Synthetic: LEPR reverse primer
  source 1..26: mol_type = other DNA
caagacaacttaaatctccaaggagt

SEQ ID NO: 1933 - DNA, 29 bp, synthetic construct
  misc_feature 1..29: note = Synthetic: LEPR forward primer
  source 1..29: mol_type = other DNA
ataactgcgtttaacttgtcatatccaat

SEQ ID NO: 1934 - DNA, 26 bp, synthetic construct
  misc_feature 1..26: note = Synthetic: LEPR reverse primer
  source 1..26: mol_type = other DNA
gcaaaaggaagtagtcataggttgaa

SEQ ID NO: 1935 - DNA, 18 bp, synthetic construct
  misc_feature 1..18: note = Synthetic: LCE2D forward primer
  source 1..18: mol_type = other DNA
tgtggtcccagctctggg

SEQ ID NO: 1936 - DNA, 24 bp, synthetic construct
  misc_feature 1..24: note = Synthetic: LCE2D reverse primer
  source 1..24: mol_type = other DNA
aggttcactctcacagcaatcggg

SEQ ID NO: 1937 - DNA, 23 bp, synthetic construct
  misc_feature 1..23: note = Synthetic: LCE2B forward primer
  source 1..23: mol_type = other DNA
cccaagtgtaccccaaaatgtcc

SEQ ID NO: 1938 - DNA, 21 bp, synthetic construct
  misc_feature 1..21: note = Synthetic: LCE2B reverse primer
  source 1..21: mol_type = other DNA
gagactgcaggggaacatgga

SEQ ID NO: 1939 - DNA, 20 bp, synthetic construct
  misc_feature 1..20: note = Synthetic: LCE2B forward primer
  source 1..20: mol_type = other DNA
ctaaatgcctgccccagtgc

SEQ ID NO: 1940 - DNA, 17 bp, synthetic construct
  misc_feature 1..17: note = Synthetic: LCE2B reverse primer
  source 1..17: mol_type = other DNA
ccccagagttgcagcag

SEQ ID NO: 1941 - DNA, 18 bp, synthetic construct
  misc_feature 1..18: note = Synthetic: LCE2B forward primer
  source 1..18: mol_type = other DNA
gctgtggtcccagctctg

SEQ ID NO: 1942 - DNA, 17 bp, synthetic construct
  misc_feature 1..17: note = Synthetic: LCE2B reverse primer
  source 1..17: mol_type = other DNA
gccggtggaagagacgg

SEQ ID NO: 1943 - DNA, 17 bp, synthetic construct
  misc_feature 1..17: note = Synthetic: LCE2B forward primer
  source 1..17: mol_type = other DNA
gtggctgctgcctgagc

SEQ ID NO: 1944 - DNA, 17 bp, synthetic construct
  misc_feature 1..17: note = Synthetic: LCE2B reverse primer
  source 1..17: mol_type = other DNA
agcagtcggggctctgg

SEQ ID NO: 1945 - DNA, 21 bp, synthetic construct
  misc_feature 1..21: note = Synthetic: LARP4B forward primer
  source 1..21: mol_type = other DNA
accaccagccttacctagata

SEQ ID NO: 1946 - DNA, 24 bp, synthetic construct
  misc_feature 1..24: note = Synthetic: LARP4B reverse primer
  source 1..24: mol_type = other DNA
aggaaatgagtctcaaccagacag

SEQ ID NO: 1947 - DNA, 34 bp, synthetic construct
  misc_feature 1..34: note = Synthetic: LAMA2 forward primer
  source 1..34: mol_type = other DNA
tttcatattgtgtagattcacatctctttaatca

SEQ ID NO: 1948 - DNA, 27 bp, synthetic construct
  misc_feature 1..27: note = Synthetic: LAMA2 reverse primer
  source 1..27: mol_type = other DNA
tcctctgaaatctcaggcgaatatagc

SEQ ID NO: 1949 - DNA, 27 bp, synthetic construct
  misc_feature 1..27: note = Synthetic: LAMA2 forward primer
  source 1..27: mol_type = other DNA
ccttctccagaactgctagaatttacc

SEQ ID NO: 1950 - DNA, 23 bp, synthetic construct
  misc_feature 1..23: note = Synthetic: LAMA2 reverse primer
  source 1..23: mol_type = other DNA
tcttgggtctttgtgagcaaaca

SEQ ID NO: 1951 - DNA, 22 bp, synthetic construct
  misc_feature 1..22: note = Synthetic: KRTAP6-2 forward primer
  source 1..22: mol_type = other DNA
cgatgtcacaggatagaggatg

SEQ ID NO: 1952 - DNA, 19 bp, synthetic construct
  misc_feature 1..19: note = Synthetic: KRTAP6-2 reverse primer
  source 1..19: mol_type = other DNA
cggctcccgcttcttctgt

SEQ ID NO: 1953 - DNA, 18 bp, synthetic construct
  misc_feature 1..18: note = Synthetic: KRTAP6-2 forward primer
  source 1..18: mol_type = other DNA
ccagagccgcatccatag

SEQ ID NO: 1954 - DNA, 23 bp, synthetic construct
  misc_feature 1..23: note = Synthetic: KRTAP6-2 reverse primer
  source 1..23: mol_type = other DNA
tatagctcctgctgtggctatgg

SEQ ID NO: 1955 - DNA, 22 bp, synthetic construct
  misc_feature 1..22: note = Synthetic: KRAS forward primer
  source 1..22: mol_type = other DNA
ggtcctgcaccagtaatatgca

SEQ ID NO: 1956 - DNA, 22 bp, synthetic construct
  misc_feature 1..22: note = Synthetic: KRAS reverse primer
  source 1..22: mol_type = other DNA
caagagtgccttgacgatacag

SEQ ID NO: 1957 - DNA, 31 bp, synthetic construct
  misc_feature 1..31: note = Synthetic: KRAS forward primer
  source 1..31: mol_type = other DNA
atcatattcgtccacaaaatgattctgaatt

SEQ ID NO: 1958 - DNA, 30 bp, synthetic construct
  misc_feature 1..30: note = Synthetic: KRAS reverse primer
  source 1..30: mol_type = other DNA
tttattataaggcctgctgaaaatgactga

SEQ ID NO: 1959 - DNA, 22 bp, synthetic construct
  misc_feature 1..22: note = Synthetic: KRAS forward primer
  source 1..22: mol_type = other DNA
cagctccaactaccacaagttt

SEQ ID NO: 1960 - DNA, 28 bp, synthetic construct
  misc_feature 1..28: note = Synthetic: KRAS reverse primer
  source 1..28: mol_type = other DNA
gtactggtggagtatttgatagtgtatt

SEQ ID NO: 1961 - DNA, 31 bp, synthetic construct
  misc_feature 1..31: note = Synthetic: KRAS forward primer
  source 1..31: mol_type = other DNA
cacctataatggtgaatatcttcaaatgatt

SEQ ID NO: 1962 - DNA, 26 bp, synthetic construct
  misc_feature 1..26: note = Synthetic: KRAS reverse primer
  source 1..26: mol_type = other DNA
gtctcttggatattctcgacacagca

SEQ ID NO: 1963 - DNA, 23 bp, synthetic construct
  misc_feature 1..23: note = Synthetic: KRAS forward primer
  source 1..23: mol_type = other DNA
gcactgtactcctcttgacctgc

SEQ ID NO: 1964 - DNA, 24 bp, synthetic construct
  misc_feature 1..24: note = Synthetic: KRAS reverse primer
  source 1..24: mol_type = other DNA
tctcaggattcctacaggaagcaa

SEQ ID NO: 1965 - DNA, 23 bp, synthetic construct
  misc_feature 1..23: note = Synthetic: KRAS forward primer
  source 1..23: mol_type = other DNA
ctgagcctgttttgtgtctactg

SEQ ID NO: 1966 - DNA, 25 bp, synthetic construct
  misc_feature 1..25: note = Synthetic: KRAS reverse primer
  source 1..25: mol_type = other DNA
ctctgaagatgtacctatggtccta

SEQ ID NO: 1967 - DNA, 34 bp, synthetic construct
  misc_feature 1..34: note = Synthetic: KRAS forward primer
  source 1..34: mol_type = other DNA
cagaaaacagatctgtatttatttcagtgttact

SEQ ID NO: 1968 - DNA, 29 bp, synthetic construct
  misc_feature 1..29: note = Synthetic: KRAS reverse primer
  source 1..29: mol_type = other DNA
acttagcaagaagttatggaattcctttt

SEQ ID NO: 1969 - DNA, 28 bp, synthetic construct
  misc_feature 1..28: note = Synthetic: KNTC1 forward primer
  source 1..28: mol_type = other DNA
acttctgtgtttcttcccatttagatgt

SEQ ID NO: 1970 - DNA, 30 bp, synthetic construct
  misc_feature 1..30: note = Synthetic: KNTC1 reverse primer
  source 1..30: mol_type = other DNA
cattaatagcagactccaaaattcttgtcc

SEQ ID NO: 1971 - DNA, 21 bp, synthetic construct
  misc_feature 1..21: note = Synthetic: KNSTRN forward primer
  source 1..21: mol_type = other DNA
agcgaaccttccgtacagtat

SEQ ID NO: 1972 - DNA, 19 bp, synthetic construct
  misc_feature 1..19: note = Synthetic: KNSTRN reverse primer
  source 1..19: mol_type = other DNA
gtgggtgggaatcgcactc

SEQ ID NO: 1973 - DNA, 20 bp, synthetic construct
  misc_feature 1..20: note = Synthetic: KNSTRN forward primer
  source 1..20: mol_type = other DNA
ctggacagagttttccgtac

SEQ ID NO: 1974 - DNA, 27 bp, synthetic construct
  misc_feature 1..27: note = Synthetic: KNSTRN reverse primer
  source 1..27: mol_type = other DNA
caaatagaaacttccggtagctaggcg

SEQ ID NO: 1975 - DNA, 21 bp, synthetic construct
  misc_feature 1..21: note = Synthetic: KMT2D forward primer
  source 1..21: mol_type = other DNA
caccaggccgatatggtttac

SEQ ID NO: 1976 - DNA, 20 bp, synthetic construct
  misc_feature 1..20: note = Synthetic: KMT2D reverse primer
  source 1..20: mol_type = other DNA
atgtggagcctggcaaagag

SEQ ID NO: 1977 - DNA, 21 bp, synthetic construct
  misc_feature 1..21: note = Synthetic: KLHL3 forward primer
  source 1..21: mol_type = other DNA
gttgcatggaggatgtgtccc

SEQ ID NO: 1978 - DNA, 20 bp, synthetic construct
  misc_feature 1..20: note = Synthetic: KLHL3 reverse primer
  source 1..20: mol_type = other DNA
agcggtgctcaatgacttgc

SEQ ID NO: 1979 - DNA, 19 bp, synthetic construct
  misc_feature 1..19: note = Synthetic: KLHL3 forward primer
  source 1..19: mol_type = other DNA
gccatcaaagcctcccact

SEQ ID NO: 1980 - DNA, 20 bp, synthetic construct
  misc_feature 1..20: note = Synthetic: KLHL3 reverse primer
  source 1..20: mol_type = other DNA
gaccagtggacgtccattgc

SEQ ID NO: 1981 - DNA, 21 bp, synthetic construct
  misc_feature 1..21: note = Synthetic: KLF5 forward primer
  source 1..21: mol_type = other DNA
ccgctttacctcctttgttcg

SEQ ID NO: 1982 - DNA, 17 bp, synthetic construct
  misc_feature 1..17: note = Synthetic: KLF5 reverse primer
  source 1..17: mol_type = other DNA
gggcttggcgcctgtgt

SEQ ID NO: 1983 - DNA, 17 bp, synthetic construct
  misc_feature 1..17: note = Synthetic: KLF5 forward primer
  source 1..17: mol_type = other DNA
cgccactaccggaagca

SEQ ID NO: 1984 - DNA, 18 bp, synthetic construct
  misc_feature 1..18: note = Synthetic: KLF5 reverse primer
  source 1..18: mol_type = other DNA
gtcagagcgcgagaagct

SEQ ID NO: 1985 - DNA, 21 bp, synthetic construct
  misc_feature 1..21: note = Synthetic: KIF9 forward primer
  source 1..21: mol_type = other DNA
ccctccttctttgcctctagc

SEQ ID NO: 1986 - DNA, 22 bp, synthetic construct
  misc_feature 1..22: note = Synthetic: KIF9 reverse primer
  source 1..22: mol_type = other DNA
ctggagaaggaactagcactac

SEQ ID NO: 1987 - DNA, 21 bp, synthetic construct
  misc_feature 1..21: note = Synthetic: KIF2B forward primer
  source 1..21: mol_type = other DNA
tccaacgagttggtgtaccag

SEQ ID NO: 1988 - DNA, 22 bp, synthetic construct
  misc_feature 1..22: note = Synthetic: KIF2B reverse primer
  source 1..22: mol_type = other DNA
cgttcctgaaaagtctccaccc

SEQ ID NO: 1989 - DNA, 21 bp, synthetic construct
  misc_feature 1..21: note = Synthetic: KIF2B forward primer
  source 1..21: mol_type = other DNA
gaagtgggaagacgtacacca

SEQ ID NO: 1990 - DNA, 25 bp, synthetic construct
  misc_feature 1..25: note = Synthetic: KIF2B reverse primer
  source 1..25: mol_type = other DNA
tttctgagcaggagaaagacatcct

SEQ ID NO: 1991 - DNA, 18 bp, synthetic construct
  misc_feature 1..18: note = Synthetic: KIAA1683 forward primer
  source 1..18: mol_type = other DNA
agccgcgccaagtagctt

SEQ ID NO: 1992 - DNA, 20 bp, synthetic construct
  misc_feature 1..20: note = Synthetic: KIAA1683 reverse primer
  source 1..20: mol_type = other DNA
gaggagatccgcatcctcgc

SEQ ID NO: 1993 - DNA, 19 bp, synthetic construct
  misc_feature 1..19: note = Synthetic: KIAA1683 forward primer
  source 1..19: mol_type = other DNA
ccgcctggatagtgatcac

SEQ ID NO: 1994 - DNA, 18 bp, synthetic construct
  misc_feature 1..18: note = Synthetic: KIAA1683 reverse primer
  source 1..18: mol_type = other DNA
acacctggcgcaacaagg

SEQ ID NO: 1995 - DNA, 33 bp, synthetic construct
  misc_feature 1..33: note = Synthetic: KIAA1377 forward primer
  source 1..33: mol_type = other DNA
tcattagagatatgaaaatccatctggagaaaa

SEQ ID NO: 1996 - DNA, 28 bp, synthetic construct
  misc_feature 1..28: note = Synthetic: KIAA1377 reverse primer
  source 1..28: mol_type = other DNA
atttgactccacaaaatatttacgtgct

SEQ ID NO: 1997 - DNA, 19 bp, synthetic construct
  misc_feature 1..19: note = Synthetic: KHDRBS3 forward primer
  source 1..19: mol_type = other DNA
aagcacagctccaggagtt

SEQ ID NO: 1998 - DNA, 19 bp, synthetic construct
  misc_feature 1..19: note = Synthetic: KHDRBS3 reverse primer
  source 1..19: mol_type = other DNA
ggggctggtacacctcttg

SEQ ID NO: 1999 - DNA, 17 bp, synthetic construct
  misc_feature 1..17: note = Synthetic: KEAP1 forward primer
  source 1..17: mol_type = other DNA
tgcaggtccgccaaccg

SEQ ID NO: 2000 - DNA, 17 bp, synthetic construct
  misc_feature 1..17: note = Synthetic: KEAP1 reverse primer
  source 1..17: mol_type = other DNA
gccgggcgcccaaggtg

SEQ ID NO: 2001 - DNA, 18 bp, synthetic construct
  misc_feature 1..18: note = Synthetic: KEAP1 forward primer
  source 1..18: mol_type = other DNA
cccgcggtgtagatcagg

SEQ ID NO: 2002 - DNA, 17 bp, synthetic construct
  misc_feature 1..17: note = Synthetic: KEAP1 reverse primer
  source 1..17: mol_type = other DNA
acaagcccacgcaggtg

SEQ ID NO: 2003 - DNA, 21 bp, synthetic construct
  misc_feature 1..21: note = Synthetic: KEAP1 forward primer
  source 1..21: mol_type = other DNA
tgatcattcgccactcgttcc

SEQ ID NO: 2004 - DNA, 19 bp, synthetic construct
  misc_feature 1..19: note = Synthetic: KEAP1 reverse primer
  source 1..19: mol_type = other DNA
tggctgtcctcaatcgtct

SEQ ID NO: 2005 - DNA, 27 bp, synthetic construct
  misc_feature 1..27: note = Synthetic: KEAP1 forward primer
  source 1..27: mol_type = other DNA
tagtaacactcagctgaattaaggcgg

SEQ ID NO: 2006 - DNA, 19 bp, synthetic construct
  misc_feature 1..19: note = Synthetic: KEAP1 reverse primer
  source 1..19: mol_type = other DNA
ccaatgctgacacgaagga

SEQ ID NO: 2007 - DNA, 17 bp, synthetic construct
  misc_feature 1..17: note = Synthetic: KEAP1 forward primer
  source 1..17: mol_type = other DNA
cacgcccaccccgatcc

SEQ ID NO: 2008 - DNA, 18 bp, synthetic construct
  misc_feature 1..18: note = Synthetic: KEAP1 reverse primer
  source 1..18: mol_type = other DNA
ccagagcgggatgagtgg

SEQ ID NO: 2009 - DNA, 21 bp, synthetic construct
  misc_feature 1..21: note = Synthetic: KEAP1 forward primer
  source 1..21: mol_type = other DNA
catgaccttggggtggatacc

SEQ ID NO: 2010 - DNA, 20 bp, synthetic construct
  misc_feature 1..20: note = Synthetic: KEAP1 reverse primer
  source 1..20: mol_type = other DNA
catccagccctgtcttcaag

SEQ ID NO: 2011 - DNA, 18 bp, synthetic construct
  misc_feature 1..18: note = Synthetic: KEAP1 forward primer
  source 1..18: mol_type = other DNA
gcccgttggtgaacatgg

SEQ ID NO: 2012 - DNA, 20 bp, synthetic construct
  misc_feature 1..20: note = Synthetic: KEAP1 reverse primer
  source 1..20: mol_type = other DNA
agttcatggcccacaaggtg

SEQ ID NO: 2013 - DNA, 19 bp, synthetic construct
  misc_feature 1..19: note = Synthetic: KEAP1 forward primer
  source 1..19: mol_type = other DNA
acagccaatctgctcagcg

SEQ ID NO: 2014 - DNA, 23 bp, synthetic construct
  misc_feature 1..23: note = Synthetic: KEAP1 reverse primer
  source 1..23: mol_type = other DNA
catgaacggtgctgtcatgtacc

SEQ ID NO: 2015 - DNA, 17 bp, synthetic construct
  misc_feature 1..17: note = Synthetic: KEAP1 forward primer
  source 1..17: mol_type = other DNA
actgcaggcacggacaa

SEQ ID NO: 2016 - DNA, 20 bp, synthetic construct
  misc_feature 1..20: note = Synthetic: KEAP1 reverse primer
  source 1..20: mol_type = other DNA
atctccatgggcgagaagtg

SEQ ID NO: 2017 - DNA, 19 bp, synthetic construct
  misc_feature 1..19: note = Synthetic: KEAP1 forward primer
  source 1..19: mol_type = other DNA
gtccttgcagcgggagtcg

SEQ ID NO: 2018 - DNA, 17 bp, synthetic construct
  misc_feature 1..17: note = Synthetic: KEAP1 reverse primer
  source 1..17: mol_type = other DNA
gctgccactcgttgacg

SEQ ID NO: 2019 - DNA, 20 bp, synthetic construct
  misc_feature 1..20: note = Synthetic: KEAP1 forward primer
  source 1..20: mol_type = other DNA
atctgcaggaagttcggcgt

SEQ ID NO: 2020 - DNA, 20 bp, synthetic construct
  misc_feature 1..20: note = Synthetic: KEAP1 reverse primer
  source 1..20: mol_type = other DNA
cagcgacggttctacgtcca

SEQ ID NO: 2021 - DNA, 24 bp, synthetic construct
  misc_feature 1..24: note = Synthetic: KCTD8 forward primer
  source 1..24: mol_type = other DNA
atgagggtctgaaagagttcactg

SEQ ID NO: 2022 - DNA, 24 bp, synthetic construct
  misc_feature 1..24: note = Synthetic: KCTD8 reverse primer
  source 1..24: mol_type = other DNA
tttaacattggatcgcccctctaa

SEQ ID NO: 2023 - DNA, 22 bp, synthetic construct
  misc_feature 1..22: note = Synthetic: KCTD8 forward primer
  source 1..22: mol_type = other DNA
ggtgggggtatccattgtacag

SEQ ID NO: 2024 - DNA, 21 bp, synthetic construct
  misc_feature 1..21: note = Synthetic: KCTD8 reverse primer
  source 1..21: mol_type = other DNA
aacagctcaccaacctaacac

SEQ ID NO: 2025 - DNA, 30 bp, synthetic construct
  misc_feature 1..30: note = Synthetic: KCNV1 forward primer
  source 1..30: mol_type = other DNA
aatacagaaatccacatcactgctttatca

SEQ ID NO: 2026 - DNA, 20 bp, synthetic construct
  misc_feature 1..20: note = Synthetic: KCNV1 reverse primer
  source 1..20: mol_type = other DNA
tgcgactgaaaggcagagaa

SEQ ID NO: 2027 - DNA, 20 bp, synthetic construct
  misc_feature 1..20: note = Synthetic: KCNV1 forward primer
  source 1..20: mol_type = other DNA
cccgctgctcctagtacttg

SEQ ID NO: 2028 - DNA, 23 bp, synthetic construct
  misc_feature 1..23: note = Synthetic: KCNV1 reverse primer
  source 1..23: mol_type = other DNA
agatgtctatgcccggagtatca

SEQ ID NO: 2029 - DNA, 24 bp, synthetic construct
  misc_feature 1..24: note = Synthetic: KCNK10 forward primer
  source 1..24: mol_type = other DNA
caagctggacttcacttacccaag

SEQ ID NO: 2030 - DNA, 20 bp, synthetic construct
  misc_feature 1..20: note = Synthetic: KCNK10 reverse primer
  source 1..20: mol_type = other DNA
gggagacagaaccgcttgga

SEQ ID NO: 2031 - DNA, 22 bp, synthetic construct
  misc_feature 1..22: note = Synthetic: KCNK10 forward primer
  source 1..22: mol_type = other DNA
aacatccaagaaagatgccgct

SEQ ID NO: 2032 - DNA, 22 bp, synthetic construct
  misc_feature 1..22: note = Synthetic: KCNK10 reverse primer
  source 1..22: mol_type = other DNA
gaagcaatagccatggaagttg

SEQ ID NO: 2033 - DNA, 18 bp, synthetic construct
  misc_feature 1..18: note = Synthetic: KCNJ3 forward primer
  source 1..18: mol_type = other DNA
tggtggacctcaagtggc

SEQ ID NO: 2034 - DNA, 20 bp, synthetic construct
  misc_feature 1..20: note = Synthetic: KCNJ3 reverse primer
  source 1..20: mol_type = other DNA
tcacccaccacatggacgcc

SEQ ID NO: 2035 - DNA, 19 bp, synthetic construct
  misc_feature 1..19: note = Synthetic: KCNJ3 forward primer
  source 1..19: mol_type = other DNA
tggcctggcttttcatggc

SEQ ID NO: 2036 - DNA, 20 bp, synthetic construct
  misc_feature 1..20: note = Synthetic: KCNJ3 reverse primer
  source 1..20: mol_type = other DNA
gtgggctttgttcaggtcgc

SEQ ID NO: 2037 - DNA, 23 bp, synthetic construct
  misc_feature 1..23: note = Synthetic: KCNH7 forward primer
  source 1..23: mol_type = other DNA
ccaaagctctaaggcaaccttta

SEQ ID NO: 2038 - DNA, 26 bp, synthetic construct
  misc_feature 1..26: note = Synthetic: KCNH7 reverse primer
  source 1..26: mol_type = other DNA
cagacatttgtctacatctcaaccag

SEQ ID NO: 2039 - DNA, 20 bp, synthetic construct
  misc_feature 1..20: note = Synthetic: KCNH7 forward primer
  source 1..20: mol_type = other DNA
ccgaaaggctttgcagtttt

SEQ ID NO: 2040 - DNA, 25 bp, synthetic construct
  misc_feature 1..25: note = Synthetic: KCNH7 reverse primer
  source 1..25: mol_type = other DNA
taaagggtttcccagaatgcttaca

SEQ ID NO: 2041 - DNA, 31 bp, synthetic construct
  misc_feature 1..31: note = Synthetic: KCNH7 forward primer
  source 1..31: mol_type = other DNA
gcttctttgcatatgaacttttaatagtcaa

SEQ ID NO: 2042 - DNA, 21 bp, synthetic construct
  misc_feature 1..21: note = Synthetic: KCNH7 reverse primer
  source 1..21: mol_type = other DNA
ttgctggggtcagaagagagg

SEQ ID NO: 2043 - DNA, 26 bp, synthetic construct
  misc_feature 1..26: note = Synthetic: KCNH7 forward primer
  source 1..26: mol_type = other DNA
tttgtgatagtaggtgacctccactt

SEQ ID NO: 2044 - DNA, 20 bp, synthetic construct
  misc_feature 1..20: note = Synthetic: KCNH7 reverse primer
  source 1..20: mol_type = other DNA
atgcacctgcgactttctcc

SEQ ID NO: 2045 - DNA, 22 bp, synthetic construct
  misc_feature 1..22: note = Synthetic: KCNH7 forward primer
  source 1..22: mol_type = other DNA
gggcaatttgggcaatatcatg

SEQ ID NO: 2046 - DNA, 21 bp, synthetic construct
  misc_feature 1..21: note = Synthetic: KCNH7 reverse primer
  source 1..21: mol_type = other DNA
gccagatgtcatgcaaaagcc

SEQ ID NO: 2047 - DNA, 18 bp, synthetic construct
  misc_feature 1..18: note = Synthetic: KCNG1 forward primer
  source 1..18: mol_type = other DNA
ctctccaccatgtcgcgc

SEQ ID NO: 2048 - DNA, 18 bp, synthetic construct
  misc_feature 1..18: note = Synthetic: KCNG1 reverse primer
  source 1..18: mol_type = other DNA
ggagcgggaggaagagga

SEQ ID NO: 2049 - DNA, 17 bp, synthetic construct
  misc_feature 1..17: note = Synthetic: KCNG1 forward primer
  source 1..17: mol_type = other DNA
gtccagcgcgtcgtcct

SEQ ID NO: 2050 - DNA, 24 bp, synthetic construct
  misc_feature 1..24: note = Synthetic: KCNG1 reverse primer
  source 1..24: mol_type = other DNA
cctgcagaagattgaggagttcgc

SEQ ID NO: 2051 - DNA, 22 bp, synthetic construct
  misc_feature 1..22: note = Synthetic: KCNA4 forward primer
  source 1..22: mol_type = other DNA
gagtgcctggagagtttgaaga

SEQ ID NO: 2052 - DNA, 17 bp, synthetic construct
  misc_feature 1..17: note = Synthetic: KCNA4 reverse primer
  source 1..17: mol_type = other DNA
acctggcccagcaacag

SEQ ID NO: 2053 - DNA, 17 bp, synthetic construct
  misc_feature 1..17: note = Synthetic: KCNA4 forward primer
  source 1..17: mol_type = other DNA
gctgctgaccattgcca

SEQ ID NO: 2054 - DNA, 24 bp, synthetic construct
  misc_feature 1..24: note = Synthetic: KCNA4 reverse primer
  source 1..24: mol_type = other DNA
agccaagcactcttcttcaaaaac

SEQ ID NO: 2055 - DNA, 21 bp, synthetic construct
  misc_feature 1..21: note = Synthetic: KCNA4 forward primer
  source 1..21: mol_type = other DNA
ggcctcctgattgataataat

SEQ ID NO: 2056 - DNA, 23 bp, synthetic construct
  misc_feature 1..23: note = Synthetic: KCNA4 reverse primer
  source 1..23: mol_type = other DNA
ctttgaccctttgcgcaatgagt

SEQ ID NO: 2057 - DNA, 20 bp, synthetic construct
  misc_feature 1..20: note = Synthetic: KCNA4 forward primer
  source 1..20: mol_type = other DNA
ggcggttcctgtcaaaaaaa

SEQ ID NO: 2058 - DNA, 22 bp, synthetic construct
  misc_feature 1..22: note = Synthetic: KCNA4 reverse primer
  source 1..22: mol_type = other DNA
ccagtttccagagactttgttg

SEQ ID NO: 2059 - DNA, 19 bp, synthetic construct
  misc_feature 1..19: note = Synthetic: KBTBD4 forward primer
  source 1..19: mol_type = other DNA
cacagacaccagggtgtgc

SEQ ID NO: 2060 - DNA, 18 bp, synthetic construct
  misc_feature 1..18: note = Synthetic: KBTBD4 reverse primer
  source 1..18: mol_type = other DNA
tgtggtgggagggtccat

SEQ ID NO: 2061 - DNA, 22 bp, synthetic construct
  misc_feature 1..22: note = Synthetic: KBTBD4 forward primer
  source 1..22: mol_type = other DNA
ttgttgcacttccacatgcgcc

SEQ ID NO: 2062 - DNA, 23 bp, synthetic construct
  misc_feature 1..23: note = Synthetic: KBTBD4 reverse primer
  source 1..23: mol_type = other DNA
aacagtttgtgccaccagatcac

SEQ ID NO: 2063 - DNA, 27 bp, synthetic construct
  misc_feature 1..27: note = Synthetic: IGSF11 forward primer
  source 1..27: mol_type = other DNA
caatggctatgcaggacaaattttaaa

SEQ ID NO: 2064 - DNA, 27 bp, synthetic construct
  misc_feature 1..27: note = Synthetic: IGSF11 reverse primer
  source 1..27: mol_type = other DNA
ttaggggcattcttttactggagaagc

SEQ ID NO: 2065 - DNA, 17 bp, synthetic construct
  misc_feature 1..17: note = Synthetic: IGLL5 forward primer
  source 1..17: mol_type = other DNA
cagaggtgcccctgaac

SEQ ID NO: 2066 - DNA, 18 bp, synthetic construct
  misc_feature 1..18: note = Synthetic: IGLL5 reverse primer
  source 1..18: mol_type = other DNA
agctcctcaggggtctca

SEQ ID NO: 2067 - DNA, 21 bp, synthetic construct
  misc_feature 1..21: note = Synthetic: IGLL5 forward primer
  source 1..21: mol_type = other DNA
aaggccaatgagacccaagac

SEQ ID NO: 2068 - DNA, 17 bp, synthetic construct
  misc_feature 1..17: note = Synthetic: IGLL5 reverse primer
  source 1..17: mol_type = other DNA
gcgaccatggccagacc

SEQ ID NO: 2069 - DNA, 17 bp, synthetic construct
  misc_feature 1..17: note = Synthetic: IGLL5 forward primer
  source 1..17: mol_type = other DNA
agcgctggcccctgctg

SEQ ID NO: 2070 - DNA, 17 bp, synthetic construct
  misc_feature 1..17: note = Synthetic: IGLL5 reverse primer
  source 1..17: mol_type = other DNA
tgggtccccgctttgcg

SEQ ID NO: 2071 - DNA, 17 bp, synthetic construct
  misc_feature 1..17: note = Synthetic: IGLL5 forward primer
  source 1..17: mol_type = other DNA
ctgcgcccaatggttgc

SEQ ID NO: 2072 - DNA, 22 bp, synthetic construct
  misc_feature 1..22: note = Synthetic: IGLL5 reverse primer
  source 1..22: mol_type = other DNA
gaatctcttgccccttacctgc

SEQ ID NO: 2073 - DNA, 19 bp, synthetic construct
  misc_feature 1..19: note = Synthetic: IGLL5 forward primer
  source 1..19: mol_type = other DNA
ttggaagcagccgatccag

SEQ ID NO: 2074 - DNA, 19 bp, synthetic construct
  misc_feature 1..19: note = Synthetic: IGLL5 reverse primer
  source 1..19: mol_type = other DNA
tcaccctttcccagctctg

SEQ ID NO: 2075 - DNA, 28 bp, synthetic construct
  misc_feature 1..28: note = Synthetic: IFIH1 forward primer
  source 1..28: mol_type = other DNA
cctcatcactatcatcttctatgactgc

SEQ ID NO: 2076 - DNA, 27 bp, synthetic construct
  misc_feature 1..27: note = Synthetic: IFIH1 reverse primer
  source 1..27: mol_type = other DNA
agaacatttgaggaagtacaatgaggc

SEQ ID NO: 2077 - DNA, 30 bp, synthetic construct
  misc_feature 1..30: note = Synthetic: IFIH1 forward primer
  source 1..30: mol_type = other DNA
cattcgaattgtgtcattaatttgtagggc

SEQ ID NO: 2078 - DNA, 26 bp, synthetic construct
  misc_feature 1..26: note = Synthetic: IFIH1 reverse primer
  source 1..26: mol_type = other DNA
tgcaaaagaaggaaatcgcaaagaac

SEQ ID NO: 2079 - DNA, 26 bp, synthetic construct
  misc_feature 1..26: note = Synthetic: IDH1 forward primer
  source 1..26: mol_type = other DNA
caacatgacttacttgatccccataa

SEQ ID NO: 2080 - DNA, 21 bp, synthetic construct
  misc_feature 1..21: note = Synthetic: IDH1 reverse primer
  source 1..21: mol_type = other DNA
gcaaaaatatcccccggcttg

SEQ ID NO: 2081 - DNA, 24 bp, synthetic construct
  misc_feature 1..24: note = Synthetic: IBSP forward primer
  source 1..24: mol_type = other DNA
ttccttacaggctggggatataac

SEQ ID NO: 2082 - DNA, 22 bp, synthetic construct
  misc_feature 1..22: note = Synthetic: IBSP reverse primer
  source 1..22: mol_type = other DNA
tccacttctgcttcgctttctt

SEQ ID NO: 2083 - DNA, 24 bp, synthetic construct
  misc_feature 1..24: note = Synthetic: IBSP forward primer
  source 1..24: mol_type = other DNA
aggaggaagaggaaggaaatgaaa

SEQ ID NO: 2084 - DNA, 21 bp, synthetic construct
  misc_feature 1..21: note = Synthetic: IBSP reverse primer
  source 1..21: mol_type = other DNA
gtactggtgccgtttatgcct

SEQ ID NO: 2085 - DNA, 20 bp, synthetic construct
  misc_feature 1..20: note = Synthetic: HTR1A forward primer
  source 1..20: mol_type = other DNA
ccaacaccgacaccatgagg

SEQ ID NO: 2086 - DNA, 17 bp, synthetic construct
  misc_feature 1..17: note = Synthetic: HTR1A reverse primer
  source 1..17: mol_type = other DNA
ctgccatcgccttggag

SEQ ID NO: 2087 - DNA, 26 bp, synthetic construct
  misc_feature 1..26: note = Synthetic: HTR1A forward primer
  source 1..26: mol_type = other DNA
aataagataattggccacgttctgca

SEQ ID NO: 2088 - DNA, 21 bp, synthetic construct
  misc_feature 1..21: note = Synthetic: HTR1A reverse primer
  source 1..21: mol_type = other DNA
ccgtcagctaccaagtgatca

SEQ ID NO: 2089 - DNA, 21 bp, synthetic construct
  misc_feature 1..21: note = Synthetic: HS3ST4 forward primer
  source 1..21: mol_type = other DNA
aggtgctggccttcaaaaacc

SEQ ID NO: 2090 - DNA, 21 bp, synthetic construct
  misc_feature 1..21: note = Synthetic: HS3ST4 reverse primer
  source 1..21: mol_type = other DNA
gagccagttttccagatgcag

SEQ ID NO: 2091 - DNA, 24 bp, synthetic construct
  misc_feature 1..24: note = Synthetic: HS3ST4 forward primer
  source 1..24: mol_type = other DNA
cattcgaatagggatctatgcgct

SEQ ID NO: 2092 - DNA, 22 bp, synthetic construct
  misc_feature 1..22: note = Synthetic: HS3ST4 reverse primer
  source 1..22: mol_type = other DNA
ctgtactttggccatttccccg

SEQ ID NO: 2093 - DNA, 21 bp, synthetic construct
  misc_feature 1..21: note = Synthetic: HS3ST4 forward primer
  source 1..21: mol_type = other DNA
gtggtgagcgactcattgtgg

SEQ ID NO: 2094 - DNA, 23 bp, synthetic construct
  misc_feature 1..23: note = Synthetic: HS3ST4 reverse primer
  source 1..23: mol_type = other DNA
cttctcagtcacaacacgtttga

SEQ ID NO: 2095 - DNA, 24 bp, synthetic construct
  misc_feature 1..24: note = Synthetic: HRAS forward primer
  source 1..24: mol_type = other DNA
acctctatagtggggtcgtattcg

SEQ ID NO: 2096 - DNA, 24 bp, synthetic construct
  misc_feature 1..24: note = Synthetic: HRAS reverse primer
  source 1..24: mol_type = other DNA
tgacggaatataagctggtggtgg

SEQ ID NO: 2097 - DNA, 20 bp, synthetic construct
  misc_feature 1..20: note = Synthetic: HOXC13 forward primer
  source 1..20: mol_type = other DNA
aaacgcgtgccctacactaa

SEQ ID NO: 2098 - DNA, 20 bp, synthetic construct
  misc_feature 1..20: note = Synthetic: HOXC13 reverse primer
  source 1..20: mol_type = other DNA
ggcgcttctctttggtgatg

SEQ ID NO: 2099 - DNA, 21 bp, synthetic construct
  misc_feature 1..21: note = Synthetic: HOXC13 forward primer
  source 1..21: mol_type = other DNA
aggaatacgcggctagcaagt

SEQ ID NO: 2100 - DNA, 23 bp, synthetic construct
  misc_feature 1..23: note = Synthetic: HOXC13 reverse primer
  source 1..23: mol_type = other DNA
tctggaaccagatggttacctgg

SEQ ID NO: 2101 - DNA, 17 bp, synthetic construct
  misc_feature 1..17: note = Synthetic: HNRNPL forward primer
  source 1..17: mol_type = other DNA
gggggccgtagcgactt

SEQ ID NO: 2102 - DNA, 23 bp, synthetic construct
  misc_feature 1..23: note = Synthetic: HNRNPL reverse primer
  source 1..23: mol_type = other DNA
attaccatgatgagggctacggg

SEQ ID NO: 2103 - DNA, 20 bp, synthetic construct
  misc_feature 1..20: note = Synthetic: HMX3 forward primer
  source 1..20: mol_type = other DNA
tggaagaagggcgctgaaag

SEQ ID NO: 2104 - DNA, 19 bp, synthetic construct
  misc_feature 1..19: note = Synthetic: HMX3 reverse primer
  source 1..19: mol_type = other DNA
aggtggactcgagctggaa

SEQ ID NO: 2105 - DNA, 20 bp, synthetic construct
  misc_feature 1..20: note = Synthetic: HMX3 forward primer
  source 1..20: mol_type = other DNA
gaagacgcgcacagtcttct

SEQ ID NO: 2106 - DNA, 20 bp, synthetic construct
  misc_feature 1..20: note = Synthetic: HMX3 reverse primer
  source 1..20: mol_type = other DNA
tgctcagatagcgcttcatg

SEQ ID NO: 2107 - DNA, 30 bp, synthetic construct
  misc_feature 1..30: note = Synthetic: HMCN1 forward primer
  source 1..30: mol_type = other DNA
aggctgtattatttagtctcactgaatttt

SEQ ID NO: 2108 - DNA, 24 bp, synthetic construct
  misc_feature 1..24: note = Synthetic: HMCN1 reverse primer
  source 1..24: mol_type = other DNA
ttcagcgatgcattccaatacagt

SEQ ID NO: 2109 - DNA, 21 bp, synthetic construct
  misc_feature 1..21: note = Synthetic: HMCN1 forward primer
  source 1..21: mol_type = other DNA
ccccagagccttgtaattctt

SEQ ID NO: 2110 - DNA, 24 bp, synthetic construct
  misc_feature 1..24: note = Synthetic: HMCN1 reverse primer
  source 1..24: mol_type = other DNA
agctccatcctttctccatgttat

SEQ ID NO: 2111 - DNA, 22 bp, synthetic construct
  misc_feature 1..22: note = Synthetic: HMCN1 forward primer
  source 1..22: mol_type = other DNA
cttcagtggccaatgttattga

SEQ ID NO: 2112 - DNA, 24 bp, synthetic construct
  misc_feature 1..24: note = Synthetic: HMCN1 reverse primer
  source 1..24: mol_type = other DNA
aatccaccgacgttctggaatggg

SEQ ID NO: 2113 - DNA, 22 bp, synthetic construct
  misc_feature 1..22: note = Synthetic: HMCN1 forward primer
  source 1..22: mol_type = other DNA
ctgtactctgttagctggaaat

SEQ ID NO: 2114 - DNA, 30 bp, synthetic construct
  misc_feature 1..30: note = Synthetic: HMCN1 reverse primer
  source 1..30: mol_type = other DNA
gaatgcatgcatttaaaatgttcttaccat

SEQ ID NO: 2115 - DNA, 18 bp, synthetic construct
  misc_feature 1..18: note = Synthetic: HIST1H4K forward primer
  source 1..18: mol_type = other DNA
gtgaccgtcttgcgcttg

SEQ ID NO: 2116 - DNA, 19 bp, synthetic construct
  misc_feature 1..19: note = Synthetic: HIST1H4K reverse primer
  source 1..19: mol_type = other DNA
ggtgctgaaggtgttcctg

SEQ ID NO: 2117 - DNA, 17 bp, synthetic construct
  misc_feature 1..17: note = Synthetic: HIST1H4K forward primer
  source 1..17: mol_type = other DNA
tcccggatcacgttctc

SEQ ID NO: 2118 - DNA, 20 bp, synthetic construct
  misc_feature 1..20: note = Synthetic: HIST1H4K reverse primer
  source 1..20: mol_type = other DNA
ctccggcctcatctacgagg

SEQ ID NO: 2119 - DNA, 19 bp, synthetic construct
  misc_feature 1..19: note = Synthetic: HIST1H4D forward primer
  source 1..19: mol_type = other DNA
ccgccgaagccataaagag

SEQ ID NO: 2120 - DNA, 22 bp, synthetic construct
  misc_feature 1..22: note = Synthetic: HIST1H4D reverse primer
  source 1..22: mol_type = other DNA
atgtaatccgcgatgctgtcac

SEQ ID NO: 2121 - DNA, 19 bp, synthetic construct
  misc_feature 1..19: note = Synthetic: HIST1H4D forward primer
  source 1..19: mol_type = other DNA
gtcttgcgtttggcgtgtt

SEQ ID NO: 2122 - DNA, 20 bp, synthetic construct
  misc_feature 1..20: note = Synthetic: HIST1H4D reverse primer
  source 1..20: mol_type = other DNA
aactcgcggagtgctgaaag

SEQ ID NO: 2123 - DNA, 21 bp, synthetic construct
  misc_feature 1..21: note = Synthetic: HIST1H3I forward primer
  source 1..21: mol_type = other DNA
tcaaatagccccaccaggtag

SEQ ID NO: 2124 - DNA, 19 bp, synthetic construct
  misc_feature 1..19: note = Synthetic: HIST1H3I reverse primer
  source 1..19: mol_type = other DNA
acgggagatcgcacaggac

SEQ ID NO: 2125 - DNA, 21 bp, synthetic construct
  misc_feature 1..21: note = Synthetic: HIST1H3I forward primer
  source 1..21: mol_type = other DNA
aagcgcagatcggtcttaaag

SEQ ID NO: 2126 - DNA, 24 bp, synthetic construct
  misc_feature 1..24: note = Synthetic: HIST1H3I reverse primer
  source 1..24: mol_type = other DNA
gctaatccggaagctaccttttca

SEQ ID NO: 2127 - DNA, 18 bp, synthetic construct
  misc_feature 1..18: note = Synthetic: HIST1H3F forward primer
  source 1..18: mol_type = other DNA
agagccccaccaggtaag

SEQ ID NO: 2128 - DNA, 24 bp, synthetic construct
  misc_feature 1..24: note = Synthetic: HIST1H3F reverse primer
  source 1..24: mol_type = other DNA
actgattcgcaagctaccattcca

SEQ ID NO: 2129 - DNA, 20 bp, synthetic construct
  misc_feature 1..20: note = Synthetic: HIST1H3F forward primer
  source 1..20: mol_type = other DNA
cttgaagtcctgcgcgatct

SEQ ID NO: 2130 - DNA, 21 bp, synthetic construct
  misc_feature 1..21: note = Synthetic: HIST1H3F reverse primer
  source 1..21: mol_type = other DNA
ccgccgctatcagaaatcgac

SEQ ID NO: 2131 - DNA, 21 bp, synthetic construct
  misc_feature 1..21: note = Synthetic: HIST1H3C forward primer
  source 1..21: mol_type = other DNA
agcaaacagctcgcaagtcta

SEQ ID NO: 2132 - DNA, 17 bp, synthetic construct
  misc_feature 1..17: note = Synthetic: HIST1H3C reverse primer
  source 1..17: mol_type = other DNA
cggtagcgatgaggttt

SEQ ID NO: 2133 - DNA, 17 bp, synthetic construct
  misc_feature 1..17: note = Synthetic: HIST1H3C forward primer
  source 1..17: mol_type = other DNA
accggtggcgtgaagaa

SEQ ID NO: 2134 - DNA, 18 bp, synthetic construct
  misc_feature 1..18: note = Synthetic: HIST1H3C reverse primer
  source 1..18: mol_type = other DNA
gcagctcggtggacttct

SEQ ID NO: 2135 - DNA, 23 bp, synthetic construct
  misc_feature 1..23: note = Synthetic: HIST1H3B forward primer
  source 1..23: mol_type = other DNA
tcaaagagccctaccaagtaggc

SEQ ID NO: 2136 - DNA, 20 bp, synthetic construct
  misc_feature 1..20: note = Synthetic: HIST1H3B reverse primer
  source 1..20: mol_type = other DNA
gcgagaaatcgcccaagact

SEQ ID NO: 2137 - DNA, 17 bp, synthetic construct
  misc_feature 1..17: note = Synthetic: HIST1H3B forward primer
  source 1..17: mol_type = other DNA
ctgcagcgccatcaccg

SEQ ID NO: 2138 - DNA, 17 bp, synthetic construct
  misc_feature 1..17: note = Synthetic: HIST1H3B reverse primer
  source 1..17: mol_type = other DNA
agatccgccgctaccaa

SEQ ID NO: 2139 - DNA, 22 bp, synthetic construct
  misc_feature 1..22: note = Synthetic: HIST1H3B forward primer
  source 1..22: mol_type = other DNA
atcagcaactcggtcgactttt

SEQ ID NO: 2140 - DNA, 22 bp, synthetic construct
  misc_feature 1..22: note = Synthetic: HIST1H3B reverse primer
  source 1..22: mol_type = other DNA
gaaaaagcctcaccgttaccgc

SEQ ID NO: 2141 - DNA, 17 bp, synthetic construct
  misc_feature 1..17: note = Synthetic: HIST1H3B forward primer
  source 1..17: mol_type = other DNA
ctcgcgcagagccacag

SEQ ID NO: 2142 - DNA, 18 bp, synthetic construct
  misc_feature 1..18: note = Synthetic: HIST1H3B reverse primer
  source 1..18: mol_type = other DNA
caagcagctggctaccaa

SEQ ID NO: 2143 - DNA, 19 bp, synthetic construct
  misc_feature 1..19: note = Synthetic: HIST1H2BC forward primer
  source 1..19: mol_type = other DNA
tggtcgagcgcttgttgta

SEQ ID NO: 2144 - DNA, 24 bp, synthetic construct
  misc_feature 1..24: note = Synthetic: HIST1H2BC reverse primer
  source 1..24: mol_type = other DNA
atgggcatcatgaattctttcgtt

SEQ ID NO: 2145 - DNA, 20 bp, synthetic construct
  misc_feature 1..20: note = Synthetic: HIST1H2BC forward primer
  source 1..20: mol_type = other DNA
cgatgcgctcaaatatgtcg

SEQ ID NO: 2146 - DNA, 20 bp, synthetic construct
  misc_feature 1..20: note = Synthetic: HIST1H2BC reverse primer
  source 1..20: mol_type = other DNA
acaggtccatcccgacactg

SEQ ID NO: 2147 - DNA, 20 bp, synthetic construct
  misc_feature 1..20: note = Synthetic: HIST1H1E forward primer
  source 1..20: mol_type = other DNA
tccggctcgaattgctctcg

SEQ ID NO: 2148 - DNA, 18 bp, synthetic construct
  misc_feature 1..18: note = Synthetic: HIST1H1E reverse primer
  source 1..18: mol_type = other DNA
agacttgcgggccttctt

SEQ ID NO: 2149 - DNA, 17 bp, synthetic construct
  misc_feature 1..17: note = Synthetic: HIST1H1E forward primer
  source 1..17: mol_type = other DNA
ccctgccgagaagactc

SEQ ID NO: 2150 - DNA, 17 bp, synthetic construct
  misc_feature 1..17: note = Synthetic: HIST1H1E reverse primer
  source 1..17: mol_type = other DNA
cgcttggccgcacctgc

SEQ ID NO: 2151 - DNA, 21 bp, synthetic construct
  misc_feature 1..21: note = Synthetic: HIST1H1E forward primer
  source 1..21: mol_type = other DNA
ccaagaagaccccaaagaagg

SEQ ID NO: 2152 - DNA, 21 bp, synthetic construct
  misc_feature 1..21: note = Synthetic: HIST1H1E reverse primer
  source 1..21: mol_type = other DNA
tggctgctttcgcctttttcg

SEQ ID NO: 2153 - DNA, 20 bp, synthetic construct
  misc_feature 1..20: note = Synthetic: HIST1H1E forward primer
  source 1..20: mol_type = other DNA
gctgctggagccaaaaaagc

SEQ ID NO: 2154 - DNA, 22 bp, synthetic construct
  misc_feature 1..22: note = Synthetic: HIST1H1E reverse primer
  source 1..22: mol_type = other DNA
tttaactgctttggccttcgct

SEQ ID NO: 2155 - DNA, 24 bp, synthetic construct
  misc_feature 1..24: note = Synthetic: HIST1H1C forward primer
  source 1..24: mol_type = other DNA
acggctgttgtttttctccacatc

SEQ ID NO: 2156 - DNA, 17 bp, synthetic construct
  misc_feature 1..17: note = Synthetic: HIST1H1C reverse primer
  source 1..17: mol_type = other DNA
ctgtggccgcctctaaa

SEQ ID NO: 2157 - DNA, 20 bp, synthetic construct
  misc_feature 1..20: note = Synthetic: HIST1H1C forward primer
  source 1..20: mol_type = other DNA
gagaaactccgctacgctct

SEQ ID NO: 2158 - DNA, 17 bp, synthetic construct
  misc_feature 1..17: note = Synthetic: HIST1H1C reverse primer
  source 1..17: mol_type = other DNA
gaagaaggcggccaaaa

SEQ ID NO: 2159 - DNA, 23 bp, synthetic construct
  misc_feature 1..23: note = Synthetic: HEG1 forward primer
  source 1..23: mol_type = other DNA
ggaggcaaaggagagtttgttgt

SEQ ID NO: 2160 - DNA, 25 bp, synthetic construct
  misc_feature 1..25: note = Synthetic: HEG1 reverse primer
  source 1..25: mol_type = other DNA
caccaagagaaagtcattacagaat

SEQ ID NO: 2161 - DNA, 21 bp, synthetic construct
  misc_feature 1..21: note = Synthetic: HEATR6 forward primer
  source 1..21: mol_type = other DNA
ccttgggcagtacgacaatgg

SEQ ID NO: 2162 - DNA, 23 bp, synthetic construct
  misc_feature 1..23: note = Synthetic: HEATR6 reverse primer
  source 1..23: mol_type = other DNA
agaaacgtcagttagctcaccta

SEQ ID NO: 2163 - DNA, 27 bp, synthetic construct
  misc_feature 1..27: note = Synthetic: HCN1 forward primer
  source 1..27: mol_type = other DNA
ccatctgtcagcttcatttctttactg

SEQ ID NO: 2164 - DNA, 29 bp, synthetic construct
  misc_feature 1..29: note = Synthetic: HCN1 reverse primer
  source 1..29: mol_type = other DNA
tgtttcaacctggagattatatcatacga

SEQ ID NO: 2165 - DNA, 19 bp, synthetic construct
  misc_feature 1..19: note = Synthetic: HCN1 forward primer
  source 1..19: mol_type = other DNA
tttacccacggctccttct

SEQ ID NO: 2166 - DNA, 23 bp, synthetic construct
  misc_feature 1..23: note = Synthetic: HCN1 reverse primer
  source 1..23: mol_type = other DNA
atgctgagcaagttgagatttga

SEQ ID NO: 2167 - DNA, 25 bp, synthetic construct
  misc_feature 1..25: note = Synthetic: HCN1 forward primer
  source 1..25: mol_type = other DNA
tgaaattgtccacggaaagtgagta

SEQ ID NO: 2168 - DNA, 29 bp, synthetic construct
  misc_feature 1..29: note = Synthetic: HCN1 reverse primer
  source 1..29: mol_type = other DNA
tttgtttttatagagatttgcctgctgac

SEQ ID NO: 2169 - DNA, 20 bp, synthetic construct
  misc_feature 1..20: note = Synthetic: HCN1 forward primer
  source 1..20: mol_type = other DNA
cagtacgacgtcctttggtc

SEQ ID NO: 2170 - DNA, 25 bp, synthetic construct
  misc_feature 1..25: note = Synthetic: HCN1 reverse primer
  source 1..25: mol_type = other DNA
tgttttaagttgtgggaagccttaa

SEQ ID NO: 2171 - DNA, 28 bp, synthetic construct
  misc_feature 1..28: note = Synthetic: HCN1 forward primer
  source 1..28: mol_type = other DNA
aaacctgtattatgccaggagattaaat

SEQ ID NO: 2172 - DNA, 24 bp, synthetic construct
  misc_feature 1..24: note = Synthetic: HCN1 reverse primer
  source 1..24: mol_type = other DNA
aatgatgaggagagcctttgagac

SEQ ID NO: 2173 - DNA, 25 bp, synthetic construct
  misc_feature 1..25: note = Synthetic: HCN1 forward primer
  source 1..25: mol_type = other DNA
gtacctattcgatctagtcggtcaa

SEQ ID NO: 2174 - DNA, 20 bp, synthetic construct
  misc_feature 1..20: note = Synthetic: HCN1 reverse primer
  source 1..20: mol_type = other DNA
tcaacgaggtcctggaggaa

SEQ ID NO: 2175 - DNA, 18 bp, synthetic construct
  misc_feature 1..18: note = Synthetic: HCN1 forward primer
  source 1..18: mol_type = other DNA
gctgtggctgagtctgcg

SEQ ID NO: 2176 - DNA, 20 bp, synthetic construct
  misc_feature 1..20: note = Synthetic: HCN1 reverse primer
  source 1..20: mol_type = other DNA
tgtacagagccctctggccg

SEQ ID NO: 2177 - DNA, 21 bp, synthetic construct
  misc_feature 1..21: note = Synthetic: HCN1 forward primer
  source 1..21: mol_type = other DNA
gaggcatagtggaaagttcga

SEQ ID NO: 2178 - DNA, 18 bp, synthetic construct
  misc_feature 1..18: note = Synthetic: HCN1 reverse primer
  source 1..18: mol_type = other DNA
tcctgtcaccctgctcct

SEQ ID NO: 2179 - DNA, 19 bp, synthetic construct
  misc_feature 1..19: note = Synthetic: HCN1 forward primer
  source 1..19: mol_type = other DNA
caggagggctgcagaccgc

SEQ ID NO: 2180 - DNA, 20 bp, synthetic construct
  misc_feature 1..20: note = Synthetic: HCN1 reverse primer
  source 1..20: mol_type = other DNA
tctcacagcaacctgcactc

SEQ ID NO: 2181 - DNA, 24 bp, synthetic construct
  misc_feature 1..24: note = Synthetic: HCN1 forward primer
  source 1..24: mol_type = other DNA
tgggatggatgagatgaagtcaac

SEQ ID NO: 2182 - DNA, 25 bp, synthetic construct
  misc_feature 1..25: note = Synthetic: HCN1 reverse primer
  source 1..25: mol_type = other DNA
cagttctgaaatcatcctggacccc

SEQ ID NO: 2183 - DNA, 34 bp, synthetic construct
  misc_feature 1..34: note = Synthetic: HCN1 forward primer
  source 1..34: mol_type = other DNA
aaaccagctttttaaataattcatcttgatcact

SEQ ID NO: 2184 - DNA, 29 bp, synthetic construct
  misc_feature 1..29: note = Synthetic: HCN1 reverse primer
  source 1..29: mol_type = other DNA
cctattggacctgatcatgaattttagga

SEQ ID NO: 2185 - DNA, 27 bp, synthetic construct
  misc_feature 1..27: note = Synthetic: HCN1 forward primer
  source 1..27: mol_type = other DNA
catcttacctcttcccattgatgtatg

SEQ ID NO: 2186 - DNA, 31 bp, synthetic construct
  misc_feature 1..31: note = Synthetic: HCN1 reverse primer
  source 1..31: mol_type = other DNA
gaaaaaggaatggattctgaagtttacaaga

SEQ ID NO: 2187 - DNA, 17 bp, synthetic construct
  misc_feature 1..17: note = Synthetic: HCN1 forward primer
  source 1..17: mol_type = other DNA
gcgaagtgccctggctg

SEQ ID NO: 2188 - DNA, 25 bp, synthetic construct
  misc_feature 1..25: note = Synthetic: HCN1 reverse primer
  source 1..25: mol_type = other DNA
agtggattatatctttcttattgta

SEQ ID NO: 2189 - DNA, 25 bp, synthetic construct
  misc_feature 1..25: note = Synthetic: GRXCR1 forward primer
  source 1..25: mol_type = other DNA
gtgatttataccacctgccttcgtg

SEQ ID NO: 2190 - DNA, 28 bp, synthetic construct
  misc_feature 1..28: note = Synthetic: GRXCR1 reverse primer
  source 1..28: mol_type = other DNA
ttttctcttcaaattttacgcgatggtt

SEQ ID NO: 2191 - DNA, 26 bp, synthetic construct
  misc_feature 1..26: note = Synthetic: GRXCR1 forward primer
  source 1..26: mol_type = other DNA
acaacctttgaaagatgtgaactggt

SEQ ID NO: 2192 - DNA, 28 bp, synthetic construct
  misc_feature 1..28: note = Synthetic: GRXCR1 reverse primer
  source 1..28: mol_type = other DNA
gttcgtctaactcttttccatattcacc

SEQ ID NO: 2193 - DNA, 20 bp, synthetic construct
  misc_feature 1..20: note = Synthetic: GRM8 forward primer
  source 1..20: mol_type = other DNA
ccctcgagatctgggtgaag

SEQ ID NO: 2194 - DNA, 20 bp, synthetic construct
  misc_feature 1..20: note = Synthetic: GRM8 reverse primer
  source 1..20: mol_type = other DNA
atcgtgacagcactgggatg

SEQ ID NO: 2195 - DNA, 20 bp, synthetic construct
  misc_feature 1..20: note = Synthetic: GRM8 forward primer
  source 1..20: mol_type = other DNA
tcagaagccagtgtcgaaac

SEQ ID NO: 2196 - DNA, 20 bp, synthetic construct
  misc_feature 1..20: note = Synthetic: GRM8 reverse primer
  source 1..20: mol_type = other DNA
gactcctaccaagcccaagc

SEQ ID NO: 2197 - DNA, 24 bp, synthetic construct
  misc_feature 1..24: note = Synthetic: GRM5 forward primer
  source 1..24: mol_type = other DNA
caattggcttcatggcatcacaga

SEQ ID NO: 2198 - DNA, 24 bp, synthetic construct
  misc_feature 1..24: note = Synthetic: GRM5 reverse primer
  source 1..24: mol_type = other DNA
atcaacgccatctattcgatggcc

SEQ ID NO: 2199 - DNA, 21 bp, synthetic construct
  misc_feature 1..21: note = Synthetic: GRM5 forward primer
  source 1..21: mol_type = other DNA
gcatgttgtggagcccatagg

SEQ ID NO: 2200 - DNA, 25 bp, synthetic construct
  misc_feature 1..25: note = Synthetic: GRM5 reverse primer
  source 1..25: mol_type = other DNA
acaggttctctgactctgaaaacac

SEQ ID NO: 2201 - DNA, 20 bp, synthetic construct
  misc_feature 1..20: note = Synthetic: GRIN2B forward primer
  source 1..20: mol_type = other DNA
tgggcactgaggacttgttg

SEQ ID NO: 2202 - DNA, 20 bp, synthetic construct
  misc_feature 1..20: note = Synthetic: GRIN2B reverse primer
  source 1..20: mol_type = other DNA
gacaagggccgattcatgga

SEQ ID NO: 2203 - DNA, 20 bp, synthetic construct
  misc_feature 1..20: note = Synthetic: GRIN2B forward primer
  source 1..20: mol_type = other DNA
aaacatgtgggcgtaggggc

SEQ ID NO: 2204 - DNA, 17 bp, synthetic construct
  misc_feature 1..17: note = Synthetic: GRIN2B reverse primer
  source 1..17: mol_type = other DNA
ggcagcactcctacgac

SEQ ID NO: 2205 - DNA, 22 bp, synthetic construct
  misc_feature 1..22: note = Synthetic: GRIK2 forward primer
  source 1..22: mol_type = other DNA
ctgggggttcagaatattggtg

SEQ ID NO: 2206 - DNA, 24 bp, synthetic construct
  misc_feature 1..24: note = Synthetic: GRIK2 reverse primer
  source 1..24: mol_type = other DNA
aactgaaacaagtaacatttacct

SEQ ID NO: 2207 - DNA, 22 bp, synthetic construct
  misc_feature 1..22: note = Synthetic: GRID2 forward primer
  source 1..22: mol_type = other DNA
cccttatggcacagtcctagac

SEQ ID NO: 2208 - DNA, 22 bp, synthetic construct
  misc_feature 1..22: note = Synthetic: GRID2 reverse primer
  source 1..22: mol_type = other DNA
gaatacatgctgtccctctcaa

SEQ ID NO: 2209 - DNA, 21 bp, synthetic construct
  misc_feature 1..21: note = Synthetic: GRID2 forward primer
  source 1..21: mol_type = other DNA
atgtccgcatgaaaggactga

SEQ ID NO: 2210 - DNA, 22 bp, synthetic construct
  misc_feature 1..22: note = Synthetic: GRID2 reverse primer
  source 1..22: mol_type = other DNA
cgatccattgcttcggttgatc

SEQ ID NO: 2211 - DNA, 20 bp, synthetic construct
  misc_feature 1..20: note = Synthetic: GRID1 forward primer
  source 1..20: mol_type = other DNA
gagatgcggtggttgttcct

SEQ ID NO: 2212 - DNA, 19 bp, synthetic construct
  misc_feature 1..19: note = Synthetic: GRID1 reverse primer
  source 1..19: mol_type = other DNA
tggtccggcaaatctttcc

SEQ ID NO: 2213 - DNA, 24 bp, synthetic construct
  misc_feature 1..24: note = Synthetic: GRID1 forward primer
  source 1..24: mol_type = other DNA
gtgcatttctgattgtcctttgca

SEQ ID NO: 2214 - DNA, 20 bp, synthetic construct
  misc_feature 1..20: note = Synthetic: GRID1 reverse primer
  source 1..20: mol_type = other DNA
ggtccatagtgcccttggaa

SEQ ID NO: 2215 - DNA, 17 bp, synthetic construct
  misc_feature 1..17: note = Synthetic: GREM2 forward primer
  source 1..17: mol_type = other DNA
gtgccgcgggatgtaga

SEQ ID NO: 2216 - DNA, 18 bp, synthetic construct
  misc_feature 1..18: note = Synthetic: GREM2 reverse primer
  source 1..18: mol_type = other DNA
tcaccgagcgcaagtacc

SEQ ID NO: 2217 - DNA, 21 bp, synthetic construct
  misc_feature 1..21: note = Synthetic: GREM2 forward primer
  source 1..21: mol_type = other DNA
gtcttgcaccagtcactcttg

SEQ ID NO: 2218 - DNA, 21 bp, synthetic construct
  misc_feature 1..21: note = Synthetic: GREM2 reverse primer
  source 1..21: mol_type = other DNA
agatggcagcaccagatcaag

SEQ ID NO: 2219 - DNA, 23 bp, synthetic construct
  misc_feature 1..23: note = Synthetic: GPT forward primer
  source 1..23: mol_type = other DNA
gaggagaacttcacctgtacttc

SEQ ID NO: 2220 - DNA, 18 bp, synthetic construct
  misc_feature 1..18: note = Synthetic: GPT reverse primer
  source 1..18: mol_type = other DNA
tgtaccgcgccacgtcct

SEQ ID NO: 2221 - DNA, 19 bp, synthetic construct
  misc_feature 1..19: note = Synthetic: GPT forward primer
  source 1..19: mol_type = other DNA
tccggcatccagctgatcc

SEQ ID NO: 2222 - DNA, 21 bp, synthetic construct
  misc_feature 1..21: note = Synthetic: GPT reverse primer
  source 1..21: mol_type = other DNA
ggacaggaagacgttgttggg

SEQ ID NO: 2223 - DNA, 24 bp, synthetic construct
  misc_feature 1..24: note = Synthetic: GPRC6A forward primer
  source 1..24: mol_type = other DNA
aaccctacaactttgccaatcttt

SEQ ID NO: 2224 - DNA, 31 bp, synthetic construct
  misc_feature 1..31: note = Synthetic: GPRC6A reverse primer
  source 1..31: mol_type = other DNA
caattccatgtttttgatctcttcaataaag

SEQ ID NO: 2225 - DNA, 34 bp, synthetic construct
  misc_feature 1..34: note = Synthetic: GPRC6A forward primer
  source 1..34: mol_type = other DNA
caatccacatcttatttatattcatttcaatggc

SEQ ID NO: 2226 - DNA, 26 bp, synthetic construct
  misc_feature 1..26: note = Synthetic: GPRC6A reverse primer
  source 1..26: mol_type = other DNA
ccaggttaatgtcattgtggtatttc

SEQ ID NO: 2227 - DNA, 23 bp, synthetic construct
  misc_feature 1..23: note = Synthetic: GPR98 forward primer
  source 1..23: mol_type = other DNA
cagtgaatttgaggagcccattg

SEQ ID NO: 2228 - DNA, 29 bp, synthetic construct
  misc_feature 1..29: note = Synthetic: GPR98 reverse primer
  source 1..29: mol_type = other DNA
ggagagtcactcttagctattatgattct

SEQ ID NO: 2229 - DNA, 17 bp, synthetic construct
  misc_feature 1..17: note = Synthetic: GPR98 forward primer
  source 1..17: mol_type = other DNA
gggcgccacctagtgag

SEQ ID NO: 2230 - DNA, 18 bp, synthetic construct
  misc_feature 1..18: note = Synthetic: GPR98 reverse primer
  source 1..18: mol_type = other DNA
tccagcaccagtgataaa

SEQ ID NO: 2231 - DNA, 22 bp, synthetic construct
  misc_feature 1..22: note = Synthetic: GPR4 forward primer
  source 1..22: mol_type = other DNA
cttccatggggaacttctcaaa

SEQ ID NO: 2232 - DNA, 17 bp, synthetic construct
  misc_feature 1..17: note = Synthetic: GPR4 reverse primer
  source 1..17: mol_type = other DNA
ctgcgccgcgtcaagac

SEQ ID NO: 2233 - DNA, 18 bp, synthetic construct
  misc_feature 1..18: note = Synthetic: GPR4 forward primer
  source 1..18: mol_type = other DNA
agaccacggagctcacgg

SEQ ID NO: 2234 - DNA, 19 bp, synthetic construct
  misc_feature 1..19: note = Synthetic: GPR4 reverse primer
  source 1..19: mol_type = other DNA
ctcggtggaccgctacctg

SEQ ID NO: 2235 - DNA, 21 bp, synthetic construct
  misc_feature 1..21: note = Synthetic: GPR158 forward primer
  source 1..21: mol_type = other DNA
atcacaaacaacccccacctc

SEQ ID NO: 2236 - DNA, 22 bp, synthetic construct
  misc_feature 1..22: note = Synthetic: GPR158 reverse primer
  source 1..22: mol_type = other DNA
ctgtctctgggatctccgtaat

SEQ ID NO: 2237 - DNA, 22 bp, synthetic construct
  misc_feature 1..22: note = Synthetic: GPR158 forward primer
  source 1..22: mol_type = other DNA
ctaggtcgttccatcatgagac

SEQ ID NO: 2238 - DNA, 18 bp, synthetic construct
  misc_feature 1..18: note = Synthetic: GPR158 reverse primer
  source 1..18: mol_type = other DNA
ggggttcttcctgatgag

SEQ ID NO: 2239 - DNA, 26 bp, synthetic construct
  misc_feature 1..26: note = Synthetic: GPR141 forward primer
  source 1..26: mol_type = other DNA
cttccaggtcttcatcattatgttga

SEQ ID NO: 2240 - DNA, 27 bp, synthetic construct
  misc_feature 1..27: note = Synthetic: GPR141 reverse primer
  source 1..27: mol_type = other DNA
aacaaacaaggatgacccctataaaaa

SEQ ID NO: 2241 - DNA, 20 bp, synthetic construct
  misc_feature 1..20: note = Synthetic: GPR141 forward primer
  source 1..20: mol_type = other DNA
ttctgggctcagctgaaaaa

SEQ ID NO: 2242 - DNA, 23 bp, synthetic construct
  misc_feature 1..23: note = Synthetic: GPR141 reverse primer
  source 1..23: mol_type = other DNA
atgcgtcacaacattcaagtaat

SEQ ID NO: 2243 - DNA, 22 bp, synthetic construct
  misc_feature 1..22: note = Synthetic: GNG12 forward primer
  source 1..22: mol_type = other DNA
cgaggagctgtttctctattcc

SEQ ID NO: 2244 - DNA, 24 bp, synthetic construct
  misc_feature 1..24: note = Synthetic: GNG12 reverse primer
  source 1..24: mol_type = other DNA
accctttgctgataggaataccaa

SEQ ID NO: 2245 - DNA, 26 bp, synthetic construct
  misc_feature 1..26: note = Synthetic: GNAS forward primer
  source 1..26: mol_type = other DNA
gagatccattgacctcaattttgttt

SEQ ID NO: 2246 - DNA, 22 bp, synthetic construct
  misc_feature 1..22: note = Synthetic: GNAS reverse primer
  source 1..22: mol_type = other DNA
cctggaacttggtctcaaagat

SEQ ID NO: 2247 - DNA, 23 bp, synthetic construct
  misc_feature 1..23: note = Synthetic: GNAI2 forward primer
  source 1..23: mol_type = other DNA
tattgcacagagtgactacatcc

SEQ ID NO: 2248 - DNA, 22 bp, synthetic construct
  misc_feature 1..22: note = Synthetic: GNAI2 reverse primer
  source 1..22: mol_type = other DNA
tccttgaaggtgaagtgtgtct

SEQ ID NO: 2249 - DNA, 23 bp, synthetic construct
  misc_feature 1..23: note = Synthetic: GLI1 forward primer
  source 1..23: mol_type = other DNA
tccactctccactcaacagaagc

SEQ ID NO: 2250 - DNA, 21 bp, synthetic construct
  misc_feature 1..21: note = Synthetic: GLI1 reverse primer
  source 1..21: mol_type = other DNA
tgttttcgcagcgagctagga

SEQ ID NO: 2251 - DNA, 21 bp, synthetic construct
  misc_feature 1..21: note = Synthetic: GLI1 forward primer
  source 1..21: mol_type = other DNA
ggctgcaccaaacgctataca

SEQ ID NO: 2252 - DNA, 19 bp, synthetic construct
  misc_feature 1..19: note = Synthetic: GLI1 reverse primer
  source 1..19: mol_type = other DNA
ggtcacatgggcgtcagga

SEQ ID NO: 2253 - DNA, 23 bp, synthetic construct
  misc_feature 1..23: note = Synthetic: GLI1 forward primer
  source 1..23: mol_type = other DNA
gagcctttgtatcttctccctca

SEQ ID NO: 2254 - DNA, 20 bp, synthetic construct
  misc_feature 1..20: note = Synthetic: GLI1 reverse primer
  source 1..20: mol_type = other DNA
tttgaagggcctcagctccc

SEQ ID NO: 2255 - DNA, 19 bp, synthetic construct
  misc_feature 1..19: note = Synthetic: GJA8 forward primer
  source 1..19: mol_type = other DNA
gcgagaacgtctgctacga

SEQ ID NO: 2256 - DNA, 18 bp, synthetic construct
  misc_feature 1..18: note = Synthetic: GJA8 reverse primer
  source 1..18: mol_type = other DNA
cggggtggagacgaagat

SEQ ID NO: 2257 - DNA, 18 bp, synthetic construct
  misc_feature 1..18: note = Synthetic: GJA8 forward primer
  source 1..18: mol_type = other DNA
tctgggtgctgcagatca

SEQ ID NO: 2258 - DNA, 17 bp, synthetic construct
  misc_feature 1..17: note = Synthetic: GJA8 reverse primer
  source 1..17: mol_type = other DNA
gcggcttttgcgcttct

SEQ ID NO: 2259 - DNA, 20 bp, synthetic construct
  misc_feature 1..20: note = Synthetic: GATA3 forward primer
  source 1..20: mol_type = other DNA
gagagcctgtgcatttcaga

SEQ ID NO: 2260 - DNA, 20 bp, synthetic construct
  misc_feature 1..20: note = Synthetic: GATA3 reverse primer
  source 1..20: mol_type = other DNA
tttctggtctggatgccttc

SEQ ID NO: 2261 - DNA, 29 bp, synthetic construct
  misc_feature 1..29: note = Synthetic: GATA3 forward primer
  source 1..29: mol_type = other DNA
ttgtttagattaacagacccctgactatg

SEQ ID NO: 2262 - DNA, 28 bp, synthetic construct
  misc_feature 1..28: note = Synthetic: GATA3 reverse primer
  source 1..28: mol_type = other DNA
cactttttggatttgctagacatttttc

SEQ ID NO: 2263 - DNA, 19 bp, synthetic construct
  misc_feature 1..19: note = Synthetic: GATA3 forward primer
  source 1..19: mol_type = other DNA
aaagtgcatgactcactgg

SEQ ID NO: 2264 - DNA, 18 bp, synthetic construct
  misc_feature 1..18: note = Synthetic: GATA3 reverse primer
  source 1..18: mol_type = other DNA
tggctcagggaggacatg

SEQ ID NO: 2265 - DNA, 18 bp, synthetic construct
  misc_feature 1..18: note = Synthetic: GATA3 forward primer
  source 1..18: mol_type = other DNA
aacccggccgccctctcc

SEQ ID NO: 2266 - DNA, 18 bp, synthetic construct
  misc_feature 1..18: note = Synthetic: GATA3 reverse primer
  source 1..18: mol_type = other DNA
gcatgtggctggagtggc

SEQ ID NO: 2267 - DNA, 18 bp, synthetic construct
  misc_feature 1..18: note = Synthetic: GATA3 forward primer
  source 1..18: mol_type = other DNA
gccacatctcgcccttca

SEQ ID NO: 2268 - DNA, 19 bp, synthetic construct
  misc_feature 1..19: note = Synthetic: GATA3 reverse primer
  source 1..19: mol_type = other DNA
gcagggctctaacccatgg

SEQ ID NO: 2269 - DNA, 19 bp, synthetic construct
  misc_feature 1..19: note = Synthetic: GATA3 forward primer
  source 1..19: mol_type = other DNA
atccagcctgtcctttgga

SEQ ID NO: 2270 - DNA, 24 bp, synthetic construct
  misc_feature 1..24: note = Synthetic: GATA3 reverse primer
  source 1..24: mol_type = other DNA
aaatgcaagtcgaaagggactgca

SEQ ID NO: 2271 - DNA, 20 bp, synthetic construct
  misc_feature 1..20: note = Synthetic: GATA3 forward primer
  source 1..20: mol_type = other DNA
gacactacctgtgcaacgcc

SEQ ID NO: 2272 - DNA, 21 bp, synthetic construct
  misc_feature 1..21: note = Synthetic: GATA3 reverse primer
  source 1..21: mol_type = other DNA
ttcgcttgggcttaatgaggg

SEQ ID NO: 2273 - DNA, 23 bp, synthetic construct
  misc_feature 1..23: note = Synthetic: GATA3 forward primer
  source 1..23: mol_type = other DNA
gctctatcacaaaatgaacggac

SEQ ID NO: 2274 - DNA, 21 bp, synthetic construct
  misc_feature 1..21: note = Synthetic: GATA3 reverse primer
  source 1..21: mol_type = other DNA
atccatcccttcccgagaact

SEQ ID NO: 2275 - DNA, 33 bp, synthetic construct
  misc_feature 1..33: note = Synthetic: GATA3 forward primer
  source 1..33: mol_type = other DNA
tagtgatgacaacacatttaacatttgttttga

SEQ ID NO: 2276 - DNA, 19 bp, synthetic construct
  misc_feature 1..19: note = Synthetic: GATA3 reverse primer
  source 1..19: mol_type = other DNA
cattggcattcctcctcca

SEQ ID NO: 2277 - DNA, 20 bp, synthetic construct
  misc_feature 1..20: note = Synthetic: GATA3 forward primer
  source 1..20: mol_type = other DNA
tcctgtgcgaactgtcagac

SEQ ID NO: 2278 - DNA, 22 bp, synthetic construct
  misc_feature 1..22: note = Synthetic: GATA3 reverse primer
  source 1..22: mol_type = other DNA
aagcttgtagtagagcccacag

SEQ ID NO: 2279 - DNA, 30 bp, synthetic construct
  misc_feature 1..30: note = Synthetic: GALNT13 forward primer
  source 1..30: mol_type = other DNA
ctcaagttgacattagagaattacgtgaaa

SEQ ID NO: 2280 - DNA, 18 bp, synthetic construct
  misc_feature 1..18: note = Synthetic: GALNT13 reverse primer
  source 1..18: mol_type = other DNA
aagcagctgctcctcgaa

SEQ ID NO: 2281 - DNA, 24 bp, synthetic construct
  misc_feature 1..24: note = Synthetic: GALNT13 forward primer
  source 1..24: mol_type = other DNA
gaacgctctgggttaatacgtgcc

SEQ ID NO: 2282 - DNA, 21 bp, synthetic construct
  misc_feature 1..21: note = Synthetic: GALNT13 reverse primer
  source 1..21: mol_type = other DNA
catcctaacgtgcattcacag

SEQ ID NO: 2283 - DNA, 24 bp, synthetic construct
  misc_feature 1..24: note = Synthetic: GABRG2 forward primer
  source 1..24: mol_type = other DNA
ggaaaaacagcctaggatctctcg

SEQ ID NO: 2284 - DNA, 26 bp, synthetic construct
  misc_feature 1..26: note = Synthetic: GABRG2 reverse primer
  source 1..26: mol_type = other DNA
tgtgtagcattattcatttgaatggt

SEQ ID NO: 2285 - DNA, 22 bp, synthetic construct
  misc_feature 1..22: note = Synthetic: GABRG2 forward primer
  source 1..22: mol_type = other DNA
ctaccattgatatccgcccaag

SEQ ID NO: 2286 - DNA, 22 bp, synthetic construct
  misc_feature 1..22: note = Synthetic: GABRG2 reverse primer
  source 1..22: mol_type = other DNA
cagacactcatagccgtactct

SEQ ID NO: 2287 - DNA, 19 bp, synthetic construct
  misc_feature 1..19: note = Synthetic: GABRG2 forward primer
  source 1..19: mol_type = other DNA
ctggacggcaaggactgtg

SEQ ID NO: 2288 - DNA, 25 bp, synthetic construct
  misc_feature 1..25: note = Synthetic: GABRG2 reverse primer
  source 1..25: mol_type = other DNA
ttttggcaatgcggatatgtatcct

SEQ ID NO: 2289 - DNA, 22 bp, synthetic construct
  misc_feature 1..22: note = Synthetic: GABRG2 forward primer
  source 1..22: mol_type = other DNA
attgtcgaacaggagcttggag

SEQ ID NO: 2290 - DNA, 22 bp, synthetic construct
  misc_feature 1..22: note = Synthetic: GABRG2 reverse primer
  source 1..22: mol_type = other DNA
ggggaagaagatccgagcatag

SEQ ID NO: 2291 - DNA, 26 bp, synthetic construct
  misc_feature 1..26: note = Synthetic: GABRG1 forward primer
  source 1..26: mol_type = other DNA
caacccaataaaccaagttgaacagg

SEQ ID NO: 2292 - DNA, 23 bp, synthetic construct
  misc_feature 1..23: note = Synthetic: GABRG1 reverse primer
  source 1..23: mol_type = other DNA
agaacaggatcttggagggaagg

SEQ ID NO: 2293 - DNA, 23 bp, synthetic construct
  misc_feature 1..23: note = Synthetic: GABRG1 forward primer
  source 1..23: mol_type = other DNA
tggcaatgcgtatgtgtatcctt

SEQ ID NO: 2294 - DNA, 23 bp, synthetic construct
  misc_feature 1..23: note = Synthetic: GABRG1 reverse primer
  source 1..23: mol_type = other DNA
cagcttcttctgttgctttgaag

SEQ ID NO: 2295 - DNA, 33 bp, synthetic construct
  misc_feature 1..33: note = Synthetic: GABRG1 forward primer
  source 1..33: mol_type = other DNA
tatggaaaataaatgagagcaactacagatttt

SEQ ID NO: 2296 - DNA, 28 bp, synthetic construct
  misc_feature 1..28: note = Synthetic: GABRG1 reverse primer
  source 1..28: mol_type = other DNA
aaatctgatgctcactggataacaactc

SEQ ID NO: 2297 - DNA, 24 bp, synthetic construct
  misc_feature 1..24: note = Synthetic: GABRG1 forward primer
  source 1..24: mol_type = other DNA
cgtccatcattccaaattcgaagc

SEQ ID NO: 2298 - DNA, 28 bp, synthetic construct
  misc_feature 1..28: note = Synthetic: GABRG1 reverse primer
  source 1..28: mol_type = other DNA
aaaatttggattcctgacactttcttca

SEQ ID NO: 2299 - DNA, 28 bp, synthetic construct
  misc_feature 1..28: note = Synthetic: GABRA6 forward primer
  source 1..28: mol_type = other DNA
cgttgatttcaatgtttctaggcttacc

SEQ ID NO: 2300 - DNA, 23 bp, synthetic construct
  misc_feature 1..23: note = Synthetic: GABRA6 reverse primer
  source 1..23: mol_type = other DNA
caaacttgagtggacaagcatgc

SEQ ID NO: 2301 - DNA, 21 bp, synthetic construct
  misc_feature 1..21: note = Synthetic: GABRA6 forward primer
  source 1..21: mol_type = other DNA
gtcccatgaggctggttaact

SEQ ID NO: 2302 - DNA, 25 bp, synthetic construct
  misc_feature 1..25: note = Synthetic: GABRA6 reverse primer
  source 1..25: mol_type = other DNA
tctcagaagcctgttgtaacttaca

SEQ ID NO: 2303 - DNA, 21 bp, synthetic construct
  misc_feature 1..21: note = Synthetic: GABRA4 forward primer
  source 1..21: mol_type = other DNA
gcttcaggatgcttctctctc

SEQ ID NO: 2304 - DNA, 22 bp, synthetic construct
  misc_feature 1..22: note = Synthetic: GABRA4 reverse primer
  source 1..22: mol_type = other DNA
ttatcgagtttgctgctgtcaa

SEQ ID NO: 2305 - DNA, 29 bp, synthetic construct
  misc_feature 1..29: note = Synthetic: GABRA4 forward primer
  source 1..29: mol_type = other DNA
ttttggctttttccatttgaatattggtg

SEQ ID NO: 2306 - DNA, 26 bp, synthetic construct
  misc_feature 1..26: note = Synthetic: GABRA4 reverse primer
  source 1..26: mol_type = other DNA
gtctgctttgcttttgtattttcggc

SEQ ID NO: 2307 - DNA, 30 bp, synthetic construct
  misc_feature 1..30: note = Synthetic: GABRA2 forward primer
  source 1..30: mol_type = other DNA
tagtcgaaggatattcataggacctttaaa

SEQ ID NO: 2308 - DNA, 29 bp, synthetic construct
  misc_feature 1..29: note = Synthetic: GABRA2 reverse primer
  source 1..29: mol_type = other DNA
gtcttgtgtctacaacatttactattttc

SEQ ID NO: 2309 - DNA, 20 bp, synthetic construct
  misc_feature 1..20: note = Synthetic: GABRA2 forward primer
  source 1..20: mol_type = other DNA
ttggcccagcaggtcatatt

SEQ ID NO: 2310 - DNA, 34 bp, synthetic construct
  misc_feature 1..34: note = Synthetic: GABRA2 reverse primer
  source 1..34: mol_type = other DNA
ttctgatttcctatagatgcatatacaacttcag

SEQ ID NO: 2311 - DNA, 30 bp, synthetic construct
  misc_feature 1..30: note = Synthetic: GABRA2 forward primer
  source 1..30: mol_type = other DNA
tgcattgtaagtccaaatataagtgacctc

SEQ ID NO: 2312 - DNA, 30 bp, synthetic construct
  misc_feature 1..30: note = Synthetic: GABRA2 reverse primer
  source 1..30: mol_type = other DNA
gtagcactagattgatggttcttactaaaa

SEQ ID NO: 2313 - DNA, 22 bp, synthetic construct
  misc_feature 1..22: note = Synthetic: GABRA1 forward primer
  source 1..22: mol_type = other DNA
gccatgcataatgacagtgatt

SEQ ID NO: 2314 - DNA, 25 bp, synthetic construct
  misc_feature 1..25: note = Synthetic: GABRA1 reverse primer
  source 1..25: mol_type = other DNA
cttaccaaagacagttcttgctggt

SEQ ID NO: 2315 - DNA, 22 bp, synthetic construct
  misc_feature 1..22: note = Synthetic: GABRA1 forward primer
  source 1..22: mol_type = other DNA
agtctccttctggctcaacaga

SEQ ID NO: 2316 - DNA, 23 bp, synthetic construct
  misc_feature 1..23: note = Synthetic: GABRA1 reverse primer
  source 1..23: mol_type = other DNA
ttccatacccttccttgcgtatg

SEQ ID NO: 2317 - DNA, 23 bp, synthetic construct
  misc_feature 1..23: note = Synthetic: FSTL5 forward primer
  source 1..23: mol_type = other DNA
tgctgttgggtggttctatacat

SEQ ID NO: 2318 - DNA, 25 bp, synthetic construct
  misc_feature 1..25: note = Synthetic: FSTL5 reverse primer
  source 1..25: mol_type = other DNA
gaatgaagcaggagtggatgaagac

SEQ ID NO: 2319 - DNA, 28 bp, synthetic construct
  misc_feature 1..28: note = Synthetic: FSTL5 forward primer
  source 1..28: mol_type = other DNA
gagtcttccacaaaaagagaagagatgt

SEQ ID NO: 2320 - DNA, 28 bp, synthetic construct
  misc_feature 1..28: note = Synthetic: FSTL5 reverse primer
  source 1..28: mol_type = other DNA
tatgaagatactggagcatacacttgta

SEQ ID NO: 2321 - DNA, 22 bp, synthetic construct
  misc_feature 1..22: note = Synthetic: FSIP2 forward primer
  source 1..22: mol_type = other DNA
gagccctaaggacaaccctaag

SEQ ID NO: 2322 - DNA, 22 bp, synthetic construct
  misc_feature 1..22: note = Synthetic: FSIP2 reverse primer
  source 1..22: mol_type = other DNA
cagcactcagtcctaagtgtgt

SEQ ID NO: 2323 - DNA, 29 bp, synthetic construct
  misc_feature 1..29: note = Synthetic: FPR3 forward primer
  source 1..29: mol_type = other DNA
tcaaagagatgttgttaaatggcaaatac

SEQ ID NO: 2324 - DNA, 26 bp, synthetic construct
  misc_feature 1..26: note = Synthetic: FPR3 reverse primer
  source 1..26: mol_type = other DNA
tacgacccataaagacgtagagaatt

SEQ ID NO: 2325 - DNA, 22 bp, synthetic construct
  misc_feature 1..22: note = Synthetic: FPR3 forward primer
  source 1..22: mol_type = other DNA
ttaacagctgcctcaacccaat

SEQ ID NO: 2326 - DNA, 20 bp, synthetic construct
  misc_feature 1..20: note = Synthetic: FPR3 reverse primer
  source 1..20: mol_type = other DNA
gggccctctccaaactagtg

SEQ ID NO: 2327 - DNA, 17 bp, synthetic construct
  misc_feature 1..17: note = Synthetic: FOXG1 forward primer
  source 1..17: mol_type = other DNA
ggcaccacgggcaagct

SEQ ID NO: 2328 - DNA, 17 bp, synthetic construct
  misc_feature 1..17: note = Synthetic: FOXG1 reverse primer
  source 1..17: mol_type = other DNA
ggtgaggccggtggagg

SEQ ID NO: 2329 - DNA, 18 bp, synthetic construct
  misc_feature 1..18: note = Synthetic: FOXG1 forward primer
  source 1..18: mol_type = other DNA
ccaagctggccttcaagc

SEQ ID NO: 2330 - DNA, 18 bp, synthetic construct
  misc_feature 1..18: note = Synthetic: FOXG1 reverse primer
  source 1..18: mol_type = other DNA
cgacatgggccagtagag

SEQ ID NO: 2331 - DNA, 17 bp, synthetic construct
  misc_feature 1..17: note = Synthetic: FOXA1 forward primer
  source 1..17: mol_type = other DNA
agcgtgccaccttgacg

SEQ ID NO: 2332 - DNA, 17 bp, synthetic construct
  misc_feature 1..17: note = Synthetic: FOXA1 reverse primer
  source 1..17: mol_type = other DNA
gctggcagaactccatc

SEQ ID NO: 2333 - DNA, 22 bp, synthetic construct
  misc_feature 1..22: note = Synthetic: FOXA1 forward primer
  source 1..22: mol_type = other DNA
agtcattgaaggacagcgagtg

SEQ ID NO: 2334 - DNA, 25 bp, synthetic construct
  misc_feature 1..25: note = Synthetic: FOXA1 reverse primer
  source 1..25: mol_type = other DNA
atcatggacctcttcccctattacc

SEQ ID NO: 2335 - DNA, 17 bp, synthetic construct
  misc_feature 1..17: note = Synthetic: FOXA1 forward primer
  source 1..17: mol_type = other DNA
gtccttgcggctctcag

SEQ ID NO: 2336 - DNA, 21 bp, synthetic construct
  misc_feature 1..21: note = Synthetic: FOXA1 reverse primer
  source 1..21: mol_type = other DNA
cggcaacatgttcgagaacgg

SEQ ID NO: 2337 - DNA, 18 bp, synthetic construct
  misc_feature 1..18: note = Synthetic: FOXA1 forward primer
  source 1..18: mol_type = other DNA
tctggcggcgcaagtagc

SEQ ID NO: 2338 - DNA, 19 bp, synthetic construct
  misc_feature 1..19: note = Synthetic: FOXA1 reverse primer
  source 1..19: mol_type = other DNA
caagggctcctactggacg

SEQ ID NO: 2339 - DNA, 28 bp, synthetic construct
  misc_feature 1..28: note = Synthetic: FNIP1 forward primer
  source 1..28: mol_type = other DNA
ggaactactcaatcttgttctgtgttta

SEQ ID NO: 2340 - DNA, 18 bp, synthetic construct
  misc_feature 1..18: note = Synthetic: FNIP1 reverse primer
  source 1..18: mol_type = other DNA
gctaccagcgacgttggc

SEQ ID NO: 2341 - DNA, 22 bp, synthetic construct
  misc_feature 1..22: note = Synthetic: FNIP1 forward primer
  source 1..22: mol_type = other DNA
aaacttgttgtttggctgcgtc

SEQ ID NO: 2342 - DNA, 23 bp, synthetic construct
  misc_feature 1..23: note = Synthetic: FNIP1 reverse primer
  source 1..23: mol_type = other DNA
cactccatttccttccccaaact

SEQ ID NO: 2343 - DNA, 22 bp, synthetic construct
  misc_feature 1..22: note = Synthetic: FNDC1 forward primer
  source 1..22: mol_type = other DNA
aatgcccaagataagccaattt

SEQ ID NO: 2344 - DNA, 19 bp, synthetic construct
  misc_feature 1..19: note = Synthetic: FNDC1 reverse primer
  source 1..19: mol_type = other DNA
tagtggtgggctgcatggt

SEQ ID NO: 2345 - DNA, 21 bp, synthetic construct
  misc_feature 1..21: note = Synthetic: FNDC1 forward primer
  source 1..21: mol_type = other DNA
aaaccacccatccccctacca

SEQ ID NO: 2346 - DNA, 17 bp, synthetic construct
  misc_feature 1..17: note = Synthetic: FNDC1 reverse primer
  source 1..17: mol_type = other DNA
ggcctcggggttgtagt

SEQ ID NO: 2347 - DNA, 19 bp, synthetic construct
  misc_feature 1..19: note = Synthetic: FMN2 forward primer
  source 1..19: mol_type = other DNA
cctagccagcgctgtttca

SEQ ID NO: 2348 - DNA, 17 bp, synthetic construct
  misc_feature 1..17: note = Synthetic: FMN2 reverse primer
  source 1..17: mol_type = other DNA
gccgcctcttgatcctg

SEQ ID NO: 2349 - DNA, 20 bp, synthetic construct
  misc_feature 1..20: note = Synthetic: FMN2 forward primer
  source 1..20: mol_type = other DNA
cccgtctcagtcccctaatc

SEQ ID NO: 2350 - DNA, 17 bp, synthetic construct
  misc_feature 1..17: note = Synthetic: FMN2 reverse primer
  source 1..17: mol_type = other DNA
aggccagggcagttctg

SEQ ID NO: 2351 - DNA, 21 bp, synthetic construct
  misc_feature 1..21: note = Synthetic: FMN2 forward primer
  source 1..21: mol_type = other DNA
ggacaggccactgtaattcag

SEQ ID NO: 2352 - DNA, 20 bp, synthetic construct
  misc_feature 1..20: note = Synthetic: FMN2 reverse primer
  source 1..20: mol_type = other DNA
ctgtgtccagggcaggatac

SEQ ID NO: 2353 - DNA, 26 bp, synthetic construct
  misc_feature 1..26: note = Synthetic: FMN2 forward primer
  source 1..26: mol_type = other DNA
gatctgagaaccaaaatagctgaact

SEQ ID NO: 2354 - DNA, 23 bp, synthetic construct
  misc_feature 1..23: note = Synthetic: FMN2 reverse primer
  source 1..23: mol_type = other DNA
ccattctcaagcccttgatgacc

SEQ ID NO: 2355 - DNA, 24 bp, synthetic construct
  misc_feature 1..24: note = Synthetic: FMN2 forward primer
  source 1..24: mol_type = other DNA
agatgttgcttgaaatagtgtaac

SEQ ID NO: 2356 - DNA, 30 bp, synthetic construct
  misc_feature 1..30: note = Synthetic: FMN2 reverse primer
  source 1..30: mol_type = other DNA
atttctcaccatttatgagtctctgtcagt

SEQ ID NO: 2357 - DNA, 24 bp, synthetic construct
  misc_feature 1..24: note = Synthetic: FMN2 forward primer
  source 1..24: mol_type = other DNA
tgaccaagaggcagaggaaaattc

SEQ ID NO: 2358 - DNA, 32 bp, synthetic construct
  misc_feature 1..32: note = Synthetic: FMN2 reverse primer
  source 1..32: mol_type = other DNA
gaaatacacttagcatgttataacgctattct

SEQ ID NO: 2359 - DNA, 20 bp, synthetic construct
  misc_feature 1..20: note = Synthetic: FLRT2 forward primer
  source 1..20: mol_type = other DNA
aacaacggcagcaacacagc

SEQ ID NO: 2360 - DNA, 23 bp, synthetic construct
  misc_feature 1..23: note = Synthetic: FLRT2 reverse primer
  source 1..23: mol_type = other DNA
agaccaccagcacaaatatcacc

SEQ ID NO: 2361 - DNA, 18 bp, synthetic construct
  misc_feature 1..18: note = Synthetic: FLRT2 forward primer
  source 1..18: mol_type = other DNA
tctgctggcgggcttgat

SEQ ID NO: 2362 - DNA, 20 bp, synthetic construct
  misc_feature 1..20: note = Synthetic: FLRT2 reverse primer
  source 1..20: mol_type = other DNA
gtagcgcccctttttgtgca

SEQ ID NO: 2363 - DNA, 17 bp, synthetic construct
  misc_feature 1..17: note = Synthetic: FLNC forward primer
  source 1..17: mol_type = other DNA
tgggcagcctcagggtg

SEQ ID NO: 2364 - DNA, 17 bp, synthetic construct
  misc_feature 1..17: note = Synthetic: FLNC reverse primer
  source 1..17: mol_type = other DNA
cctgtgggtccacgatc

SEQ ID NO: 2365 - DNA, 19 bp, synthetic construct
  misc_feature 1..19: note = Synthetic: FLNC forward primer
  source 1..19: mol_type = other DNA
tggcgatgttgctgtggtg

SEQ ID NO: 2366 - DNA, 21 bp, synthetic construct
  misc_feature 1..21: note = Synthetic: FLNC reverse primer
  source 1..21: mol_type = other DNA
atggcaggtctgtatgtgcag

SEQ ID NO: 2367 - DNA, 28 bp, synthetic construct
  misc_feature 1..28: note = Synthetic: FLG forward primer
  source 1..28: mol_type = other DNA
cttctctatgagtaggtgaatatccttt

SEQ ID NO: 2368 - DNA, 23 bp, synthetic construct
  misc_feature 1..23: note = Synthetic: FLG reverse primer
  source 1..23: mol_type = other DNA
gatccaagagcccaagagaaaca

SEQ ID NO: 2369 - DNA, 25 bp, synthetic construct
  misc_feature 1..25: note = Synthetic: FLG forward primer
  source 1..25: mol_type = other DNA
ttcagaactagattcatgccttttc

SEQ ID NO: 2370 - DNA, 31 bp, synthetic construct
  misc_feature 1..31: note = Synthetic: FLG reverse primer
  source 1..31: mol_type = other DNA
gaaagaagaaacaatagaaaagggaataagg

SEQ ID NO: 2371 - DNA, 20 bp, synthetic construct
  misc_feature 1..20: note = Synthetic: FHOD3 forward primer
  source 1..20: mol_type = other DNA
gtgaaaggatgccaagcctg

SEQ ID NO: 2372 - DNA, 17 bp, synthetic construct
  misc_feature 1..17: note = Synthetic: FHOD3 reverse primer
  source 1..17: mol_type = other DNA
ccggtcccggcacccac

SEQ ID NO: 2373 - DNA, 18 bp, synthetic construct
  misc_feature 1..18: note = Synthetic: FHOD3 forward primer
  source 1..18: mol_type = other DNA
gcgatgagaccacggagc

SEQ ID NO: 2374 - DNA, 20 bp, synthetic construct
  misc_feature 1..20: note = Synthetic: FHOD3 reverse primer
  source 1..20: mol_type = other DNA
gatgctctgcaccgagtgcc

SEQ ID NO: 2375 - DNA, 19 bp, synthetic construct
  misc_feature 1..19: note = Synthetic: FGFR3 forward primer
  source 1..19: mol_type = other DNA
tcatctgcccccacagagc

SEQ ID NO: 2376 - DNA, 20 bp, synthetic construct
  misc_feature 1..20: note = Synthetic: FGFR3 reverse primer
  source 1..20: mol_type = other DNA
tgcagtggaactccacgtcg

SEQ ID NO: 2377 - DNA, 24 bp, synthetic construct
  misc_feature 1..24: note = Synthetic: FGFR2 forward primer
  source 1..24: mol_type = other DNA
aatgcagtttttcctcctactcac

SEQ ID NO: 2378 - DNA, 24 bp, synthetic construct
  misc_feature 1..24: note = Synthetic: FGFR2 reverse primer
  source 1..24: mol_type = other DNA
tctggtgtcagagatggagatgat

SEQ ID NO: 2379 - DNA, 30 bp, synthetic construct
  misc_feature 1..30: note = Synthetic: FGFR2 forward primer
  source 1..30: mol_type = other DNA
ctccaagaagatttatgatattcttgtgtt

SEQ ID NO: 2380 - DNA, 24 bp, synthetic construct
  misc_feature 1..24: note = Synthetic: FGFR2 reverse primer
  source 1..24: mol_type = other DNA
tgatgccacagagaaagacctttc

SEQ ID NO: 2381 - DNA, 27 bp, synthetic construct
  misc_feature 1..27: note = Synthetic: FER forward primer
  source 1..27: mol_type = other DNA
aaactgcctggtaggtgaaaataatgt

SEQ ID NO: 2382 - DNA, 26 bp, synthetic construct
  misc_feature 1..26: note = Synthetic: FER reverse primer
  source 1..26: mol_type = other DNA
gaatctgctttaagccagaagatgaa

SEQ ID NO: 2383 - DNA, 24 bp, synthetic construct
  misc_feature 1..24: note = Synthetic: FER forward primer
  source 1..24: mol_type = other DNA
ctttggaatgtctcgtcaagagga

SEQ ID NO: 2384 - DNA, 21 bp, synthetic construct
  misc_feature 1..21: note = Synthetic: FER reverse primer
  source 1..21: mol_type = other DNA
cttccggtgctgtccatttaa

SEQ ID NO: 2385 - DNA, 21 bp, synthetic construct
  misc_feature 1..21: note = Synthetic: FCRL5 forward primer
  source 1..21: mol_type = other DNA
cggcctcacaggagtagtttc

SEQ ID NO: 2386 - DNA, 23 bp, synthetic construct
  misc_feature 1..23: note = Synthetic: FCRL5 reverse primer
  source 1..23: mol_type = other DNA
gtcaccctaggaaataggtcgtc

SEQ ID NO: 2387 - DNA, 21 bp, synthetic construct
  misc_feature 1..21: note = Synthetic: FCRL5 forward primer
  source 1..21: mol_type = other DNA
agaggtttaaggacgctcctc

SEQ ID NO: 2388 - DNA, 21 bp, synthetic construct
  misc_feature 1..21: note = Synthetic: FCRL5 reverse primer
  source 1..21: mol_type = other DNA
cctgatcctgtaccggttttt

SEQ ID NO: 2389 - DNA, 18 bp, synthetic construct
  misc_feature 1..18: note = Synthetic: FCAMR forward primer
  source 1..18: mol_type = other DNA
ggaaggcctgagtgttcc

SEQ ID NO: 2390 - DNA, 17 bp, synthetic construct
  misc_feature 1..17: note = Synthetic: FCAMR reverse primer
  source 1..17: mol_type = other DNA
aaagaccccatccgaga

SEQ ID NO: 2391 - DNA, 17 bp, synthetic construct
  misc_feature 1..17: note = Synthetic: FCAMR forward primer
  source 1..17: mol_type = other DNA
ccctcccacagccatct

SEQ ID NO: 2392 - DNA, 19 bp, synthetic construct
  misc_feature 1..19: note = Synthetic: FCAMR reverse primer
  source 1..19: mol_type = other DNA
cccctgatgacccatctcc

SEQ ID NO: 2393 - DNA, 28 bp, synthetic construct
  misc_feature 1..28: note = Synthetic: FBXW7 forward primer
  source 1..28: mol_type = other DNA
ctgattaacggtttctgttacattgtgc

SEQ ID NO: 2394 - DNA, 23 bp, synthetic construct
  misc_feature 1..23: note = Synthetic: FBXW7 reverse primer
  source 1..23: mol_type = other DNA
gtgcatacatcagacagcacaga

SEQ ID NO: 2395 - DNA, 21 bp, synthetic construct
  misc_feature 1..21: note = Synthetic: FBXW7 forward primer
  source 1..21: mol_type = other DNA
tctcctcgcctccagttagta

SEQ ID NO: 2396 - DNA, 25 bp, synthetic construct
  misc_feature 1..25: note = Synthetic: FBXW7 reverse primer
  source 1..25: mol_type = other DNA
gattgatgaaccattgcacatcaag

SEQ ID NO: 2397 - DNA, 27 bp, synthetic construct
  misc_feature 1..27: note = Synthetic: FBXW7 forward primer
  source 1..27: mol_type = other DNA
aataatagaggaagaagtcccaaccat

SEQ ID NO: 2398 - DNA, 24 bp, synthetic construct
  misc_feature 1..24: note = Synthetic: FBXW7 reverse primer
  source 1..24: mol_type = other DNA
acaccttatatgggcatacttcca

SEQ ID NO: 2399 - DNA, 24 bp, synthetic construct
  misc_feature 1..24: note = Synthetic: FBXW7 forward primer
  source 1..24: mol_type = other DNA
tgaagatgcatacaacgcacagtg

SEQ ID NO: 2400 - DNA, 24 bp, synthetic construct
  misc_feature 1..24: note = Synthetic: FBXW7 reverse primer
  source 1..24: mol_type = other DNA
atgcagagactggagaatgtatac

SEQ ID NO: 2401 - DNA, 23 bp, synthetic construct
  misc_feature 1..23: note = Synthetic: FBXW7 forward primer
  source 1..23: mol_type = other DNA
accctcctgccatcatattgaac

SEQ ID NO: 2402 - DNA, 23 bp, synthetic construct
  misc_feature 1..23: note = Synthetic: FBXW7 reverse primer
  source 1..23: mol_type = other DNA
ctcgagatgccactcttagggtt

SEQ ID NO: 2403 - DNA, 23 bp, synthetic construct
  misc_feature 1..23: note = Synthetic: FBXW7 forward primer
  source 1..23: mol_type = other DNA
tgtaaacactggcctgtctcaat

SEQ ID NO: 2404 - DNA, 23 bp, synthetic construct
  misc_feature 1..23: note = Synthetic: FBXW7 reverse primer
  source 1..23: mol_type = other DNA
tctgtttctccctctgcagagtt

SEQ ID NO: 2405 - DNA, 22 bp, synthetic construct
  misc_feature 1..22: note = Synthetic: FBXW7 forward primer
  source 1..22: mol_type = other DNA
cagctttgtgtttgaggctctg

SEQ ID NO: 2406 - DNA, 22 bp, synthetic construct
  misc_feature 1..22: note = Synthetic: FBXW7 reverse primer
  source 1..22: mol_type = other DNA
tgggacttgaaaacgggtgaat

SEQ ID NO: 2407 - DNA, 23 bp, synthetic construct
  misc_feature 1..23: note = Synthetic: FBXW7 forward primer
  source 1..23: mol_type = other DNA
actctccaatgtgactaggtttc

SEQ ID NO: 2408 - DNA, 23 bp, synthetic construct
  misc_feature 1..23: note = Synthetic: FBXW7 reverse primer
  source 1..23: mol_type = other DNA
agctcagatgatggaactgtaaa

SEQ ID NO: 2409 - DNA, 26 bp, synthetic construct
  misc_feature 1..26: note = Synthetic: FBXW7 forward primer
  source 1..26: mol_type = other DNA
caatgtttaaaggtggtagctgttga

SEQ ID NO: 2410 - DNA, 23 bp, synthetic construct
  misc_feature 1..23: note = Synthetic: FBXW7 reverse primer
  source 1..23: mol_type = other DNA
tgcaagtgatagaaccccagttt

SEQ ID NO: 2411 - DNA, 24 bp, synthetic construct
  misc_feature 1..24: note = Synthetic: FBXW7 forward primer
  source 1..24: mol_type = other DNA
ggagcaatgaaatgaagtctcgtt

SEQ ID NO: 2412 - DNA, 25 bp, synthetic construct
  misc_feature 1..25: note = Synthetic: FBXW7 reverse primer
  source 1..25: mol_type = other DNA
accagagaaattgcttgctttagat

SEQ ID NO: 2413 - DNA, 19 bp, synthetic construct
  misc_feature 1..19: note = Synthetic: FBXL7 forward primer
  source 1..19: mol_type = other DNA
aagtactgcagcaagctgc

SEQ ID NO: 2414 - DNA, 23 bp, synthetic construct
  misc_feature 1..23: note = Synthetic: FBXL7 reverse primer
  source 1..23: mol_type = other DNA
tttgagtttggtgcagttcttgg

SEQ ID NO: 2415 - DNA, 18 bp, synthetic construct
  misc_feature 1..18: note = Synthetic: FBXL7 forward primer
  source 1..18: mol_type = other DNA
acggaccacggtgtggag

SEQ ID NO: 2416 - DNA, 21 bp, synthetic construct
  misc_feature 1..21: note = Synthetic: FBXL7 reverse primer
  source 1..21: mol_type = other DNA
ataccaaagggcatttgccga

SEQ ID NO: 2417 - DNA, 18 bp, synthetic construct
  misc_feature 1..18: note = Synthetic: FBXL7 forward primer
  source 1..18: mol_type = other DNA
ttcctgcccaccaaccag

SEQ ID NO: 2418 - DNA, 18 bp, synthetic construct
  misc_feature 1..18: note = Synthetic: FBXL7 reverse primer
  source 1..18: mol_type = other DNA
tggtctcgcccgtcaggc

SEQ ID NO: 2419 - DNA, 24 bp, synthetic construct
  misc_feature 1..24: note = Synthetic: FBN1 forward primer
  source 1..24: mol_type = other DNA
atgttccttatgctgcattcatcc

SEQ ID NO: 2420 - DNA, 26 bp, synthetic construct
  misc_feature 1..26: note = Synthetic: FBN1 reverse primer
  source 1..26: mol_type = other DNA
cgtaagcttactcttctggtcataag

SEQ ID NO: 2421 - DNA, 23 bp, synthetic construct
  misc_feature 1..23: note = Synthetic: FAT4 forward primer
  source 1..23: mol_type = other DNA
agaatccggagatctgatagcaa

SEQ ID NO: 2422 - DNA, 31 bp, synthetic construct
  misc_feature 1..31: note = Synthetic: FAT4 reverse primer
  source 1..31: mol_type = other DNA
actgacagtgatattaattctcatatccgag

SEQ ID NO: 2423 - DNA, 23 bp, synthetic construct
  misc_feature 1..23: note = Synthetic: FAT4 forward primer
  source 1..23: mol_type = other DNA
ttcgtgctgatgatggtcttcag

SEQ ID NO: 2424 - DNA, 23 bp, synthetic construct
  misc_feature 1..23: note = Synthetic: FAT4 reverse primer
  source 1..23: mol_type = other DNA
gggtctggaaaatttgggtgtat

SEQ ID NO: 2425 - DNA, 23 bp, synthetic construct
  misc_feature 1..23: note = Synthetic: FAT4 forward primer
  source 1..23: mol_type = other DNA
ttcctttgtctttgcggttacag

SEQ ID NO: 2426 - DNA, 21 bp, synthetic construct
  misc_feature 1..21: note = Synthetic: FAT4 reverse primer
  source 1..21: mol_type = other DNA
ataatggctcccctcagtggg

SEQ ID NO: 2427 - DNA, 30 bp, synthetic construct
  misc_feature 1..30: note = Synthetic: FAT4 forward primer
  source 1..30: mol_type = other DNA
ggtagaaattctgaaaaatttcacattgac

SEQ ID NO: 2428 - DNA, 23 bp, synthetic construct
  misc_feature 1..23: note = Synthetic: FAT4 reverse primer
  source 1..23: mol_type = other DNA
ttctgaagctccgtttagtggtc

SEQ ID NO: 2429 - DNA, 28 bp, synthetic construct
  misc_feature 1..28: note = Synthetic: FAM83B forward primer
  source 1..28: mol_type = other DNA
ttcctagccataatgtctgctttttatt

SEQ ID NO: 2430 - DNA, 27 bp, synthetic construct
  misc_feature 1..27: note = Synthetic: FAM83B reverse primer
  source 1..27: mol_type = other DNA
ttccatttttccatggaattttgcccc

SEQ ID NO: 2431 - DNA, 22 bp, synthetic construct
  misc_feature 1..22: note = Synthetic: FAM83B forward primer
  source 1..22: mol_type = other DNA
cgaacagtaaaaggccaagatt

SEQ ID NO: 2432 - DNA, 23 bp, synthetic construct
  misc_feature 1..23: note = Synthetic: FAM83B reverse primer
  source 1..23: mol_type = other DNA
atcactttctggcagtcaactaa

SEQ ID NO: 2433 - DNA, 27 bp, synthetic construct
  misc_feature 1..27: note = Synthetic: FAM5C forward primer
  source 1..27: mol_type = other DNA
cagaggttcatagtaaatgctctcatt

SEQ ID NO: 2434 - DNA, 28 bp, synthetic construct
  misc_feature 1..28: note = Synthetic: FAM5C reverse primer
  source 1..28: mol_type = other DNA
gcagtgttataactggacattaactctg

SEQ ID NO: 2435 - DNA, 22 bp, synthetic construct
  misc_feature 1..22: note = Synthetic: FAM5C forward primer
  source 1..22: mol_type = other DNA
aaatgtcttccatttgttcccc

SEQ ID NO: 2436 - DNA, 21 bp, synthetic construct
  misc_feature 1..21: note = Synthetic: FAM5C reverse primer
  source 1..21: mol_type = other DNA
gactaagttggacctacccct

SEQ ID NO: 2437 - DNA, 26 bp, synthetic construct
  misc_feature 1..26: note = Synthetic: FAM5C forward primer
  source 1..26: mol_type = other DNA
gatgcaatttgaatgtggtgaagtct

SEQ ID NO: 2438 - DNA, 21 bp, synthetic construct
  misc_feature 1..21: note = Synthetic: FAM5C reverse primer
  source 1..21: mol_type = other DNA
tcactctggagacgctacatc

SEQ ID NO: 2439 - DNA, 26 bp, synthetic construct
  misc_feature 1..26: note = Synthetic: FAM5C forward primer
  source 1..26: mol_type = other DNA
gtcaatgaaataagaagcggctagct

SEQ ID NO: 2440 - DNA, 23 bp, synthetic construct
  misc_feature 1..23: note = Synthetic: FAM5C reverse primer
  source 1..23: mol_type = other DNA
aacgagctgaaggaagtgattcc

SEQ ID NO: 2441 - DNA, 26 bp, synthetic construct
  misc_feature 1..26: note = Synthetic: FAM5C forward primer
  source 1..26: mol_type = other DNA
tcttacctgattcctcaaagtcactg

SEQ ID NO: 2442 - DNA, 24 bp, synthetic construct
  misc_feature 1..24: note = Synthetic: FAM5C reverse primer
  source 1..24: mol_type = other DNA
ccaaatttccagaatgcaactgcc

SEQ ID NO: 2443 - DNA, 23 bp, synthetic construct
  misc_feature 1..23: note = Synthetic: FAM5C forward primer
  source 1..23: mol_type = other DNA
cttccatggcttgaatgtccatg

SEQ ID NO: 2444 - DNA, 23 bp, synthetic construct
  misc_feature 1..23: note = Synthetic: FAM5C reverse primer
  source 1..23: mol_type = other DNA
aggaaaatgactgctggtgtcac

SEQ ID NO: 2445 - DNA, 21 bp, synthetic construct
  misc_feature 1..21: note = Synthetic: FAM19A2 forward primer
  source 1..21: mol_type = other DNA
caagcttgctgtccacttacc

SEQ ID NO: 2446 - DNA, 25 bp, synthetic construct
  misc_feature 1..25: note = Synthetic: FAM19A2 reverse primer
  source 1..25: mol_type = other DNA
aatgtaaagttcttccggatcggaa

SEQ ID NO: 2447 - DNA, 20 bp, synthetic construct
  misc_feature 1..20: note = Synthetic: FAM19A2 forward primer
  source 1..20: mol_type = other DNA
aggaacagctccatcctttc

SEQ ID NO: 2448 - DNA, 22 bp, synthetic construct
  misc_feature 1..22: note = Synthetic: FAM19A2 reverse primer
  source 1..22: mol_type = other DNA
ccatatgcagccatgtctagag

SEQ ID NO: 2449 - DNA, 29 bp, synthetic construct
  misc_feature 1..29: note = Synthetic: FAM19A1 forward primer
  source 1..29: mol_type = other DNA
ctcgaatagtcactgagttatttctaatc

SEQ ID NO: 2450 - DNA, 21 bp, synthetic construct
  misc_feature 1..21: note = Synthetic: FAM19A1 reverse primer
  source 1..21: mol_type = other DNA
ctcctcaatgcgattcttgtt

SEQ ID NO: 2451 - DNA, 21 bp, synthetic construct
  misc_feature 1..21: note = Synthetic: FAM19A1 forward primer
  source 1..21: mol_type = other DNA
aagtgatagcagcacaccgat

SEQ ID NO: 2452 - DNA, 22 bp, synthetic construct
  misc_feature 1..22: note = Synthetic: FAM19A1 reverse primer
  source 1..22: mol_type = other DNA
cagccacttttccaggtagaca

SEQ ID NO: 2453 - DNA, 22 bp, synthetic construct
  misc_feature 1..22: note = Synthetic: FAM184B forward primer
  source 1..22: mol_type = other DNA
gacaaagctggaggttacctgg

SEQ ID NO: 2454 - DNA, 22 bp, synthetic construct
  misc_feature 1..22: note = Synthetic: FAM184B reverse primer
  source 1..22: mol_type = other DNA
aaataagacacgccccacagga

SEQ ID NO: 2455 - DNA, 18 bp, synthetic construct
  misc_feature 1..18: note = Synthetic: FAM135B forward primer
  source 1..18: mol_type = other DNA
tgcagctgtgggggaaac

SEQ ID NO: 2456 - DNA, 25 bp, synthetic construct
  misc_feature 1..25: note = Synthetic: FAM135B reverse primer
  source 1..25: mol_type = other DNA
tgaccttcagggataatgctgattt

SEQ ID NO: 2457 - DNA, 26 bp, synthetic construct
  misc_feature 1..26: note = Synthetic: FAM135B forward primer
  source 1..26: mol_type = other DNA
cttagttggtagaggaaacatttgcg

SEQ ID NO: 2458 - DNA, 25 bp, synthetic construct
  misc_feature 1..25: note = Synthetic: FAM135B reverse primer
  source 1..25: mol_type = other DNA
tatggctcatgcagaaactgaagaa

SEQ ID NO: 2459 - DNA, 19 bp, synthetic construct
  misc_feature 1..19: note = Synthetic: FAM135B forward primer
  source 1..19: mol_type = other DNA
ttccgggggtggaagtgca

SEQ ID NO: 2460 - DNA, 23 bp, synthetic construct
  misc_feature 1..23: note = Synthetic: FAM135B reverse primer
  source 1..23: mol_type = other DNA
catgcttgccttctaggttgagg

SEQ ID NO: 2461 - DNA, 19 bp, synthetic construct
  misc_feature 1..19: note = Synthetic: FAM135B forward primer
  source 1..19: mol_type = other DNA
gttcggctgctgaccatcg

SEQ ID NO: 2462 - DNA, 21 bp, synthetic construct
  misc_feature 1..21: note = Synthetic: FAM135B reverse primer
  source 1..21: mol_type = other DNA
cccaccatttctcacgtgagc

SEQ ID NO: 2463 - DNA, 23 bp, synthetic construct
  misc_feature 1..23: note = Synthetic: FAM135B forward primer
  source 1..23: mol_type = other DNA
ccttcttccacggaaagaaacaa

SEQ ID NO: 2464 - DNA, 25 bp, synthetic construct
  misc_feature 1..25: note = Synthetic: FAM135B reverse primer
  source 1..25: mol_type = other DNA
gaaatacaaggaacggttgagtttt

SEQ ID NO: 2465 - DNA, 33 bp, synthetic construct
  misc_feature 1..33: note = Synthetic: FAM135B forward primer
  source 1..33: mol_type = other DNA
ccacattataaaatttatgtagctctaccgaaa

SEQ ID NO: 2466 - DNA, 27 bp, synthetic construct
  misc_feature 1..27: note = Synthetic: FAM135B reverse primer
  source 1..27: mol_type = other DNA
cttgtttttcaggtaatgagccaaaaa

SEQ ID NO: 2467 - DNA, 24 bp, synthetic construct
  misc_feature 1..24: note = Synthetic: EZH2 forward primer
  source 1..24: mol_type = other DNA
aggttatcagtgccttacctctcc

SEQ ID NO: 2468 - DNA, 21 bp, synthetic construct
  misc_feature 1..21: note = Synthetic: EZH2 reverse primer
  source 1..21: mol_type = other DNA
caggctgggggatttttatca

SEQ ID NO: 2469 - DNA, 22 bp, synthetic construct
  misc_feature 1..22: note = Synthetic: EYS forward primer
  source 1..22: mol_type = other DNA
gaacagcttgattgcctgaagt

SEQ ID NO: 2470 - DNA, 27 bp, synthetic construct
  misc_feature 1..27: note = Synthetic: EYS reverse primer
  source 1..27: mol_type = other DNA
aaccctcatcatatgtggtaaattgga

SEQ ID NO: 2471 - DNA, 24 bp, synthetic construct
  misc_feature 1..24: note = Synthetic: EYS forward primer
  source 1..24: mol_type = other DNA
tgtagaagtccaagcagatgtttt

SEQ ID NO: 2472 - DNA, 22 bp, synthetic construct
  misc_feature 1..22: note = Synthetic: EYS reverse primer
  source 1..22: mol_type = other DNA
tagacggcaattggtggaagaa

SEQ ID NO: 2473 - DNA, 29 bp, synthetic construct
  misc_feature 1..29: note = Synthetic: EYA4 forward primer
  source 1..29: mol_type = other DNA
cgcttactgaaattttacctcattatgtg

SEQ ID NO: 2474 - DNA, 24 bp, synthetic construct
  misc_feature 1..24: note = Synthetic: EYA4 reverse primer
  source 1..24: mol_type = other DNA
aaaaacaaatgagtatcagcaaga

SEQ ID NO: 2475 - DNA, 23 bp, synthetic construct
  misc_feature 1..23: note = Synthetic: EYA4 forward primer
  source 1..23: mol_type = other DNA
ctccgcatggaagaaatgatttt

SEQ ID NO: 2476 - DNA, 23 bp, synthetic construct
  misc_feature 1..23: note = Synthetic: EYA4 reverse primer
  source 1..23: mol_type = other DNA
gaggtctggtgttggatacaact

SEQ ID NO: 2477 - DNA, 22 bp, synthetic construct
  misc_feature 1..22: note = Synthetic: ESRRG forward primer
  source 1..22: mol_type = other DNA
gctggagcagtcatcatacagt

SEQ ID NO: 2478 - DNA, 22 bp, synthetic construct
  misc_feature 1..22: note = Synthetic: ESRRG reverse primer
  source 1..22: mol_type = other DNA
catcagaacggacttgactcgc

SEQ ID NO: 2479 - DNA, 21 bp, synthetic construct
  misc_feature 1..21: note = Synthetic: ESRRG forward primer
  source 1..21: mol_type = other DNA
ctcccaggataggagcagaag

SEQ ID NO: 2480 - DNA, 18 bp, synthetic construct
  misc_feature 1..18: note = Synthetic: ESRRG reverse primer
  source 1..18: mol_type = other DNA
cgccagtgggagctacag

SEQ ID NO: 2481 - DNA, 23 bp, synthetic construct
  misc_feature 1..23: note = Synthetic: ESRP1 forward primer
  source 1..23: mol_type = other DNA
gtctgcggacagagcatttatgg

SEQ ID NO: 2482 - DNA, 23 bp, synthetic construct
  misc_feature 1..23: note = Synthetic: ESRP1 reverse primer
  source 1..23: mol_type = other DNA
tcctcagctgaacactgaaagac

SEQ ID NO: 2483 - DNA, 25 bp, synthetic construct
  misc_feature 1..25: note = Synthetic: ERC2 forward primer
  source 1..25: mol_type = other DNA
gggactggatattctccatagacag

SEQ ID NO: 2484 - DNA, 21 bp, synthetic construct
  misc_feature 1..21: note = Synthetic: ERC2 reverse primer
  source 1..21: mol_type = other DNA
ttgccaaggtctcctcgtttg

SEQ ID NO: 2485 - DNA, 20 bp, synthetic construct
  misc_feature 1..20: note = Synthetic: ERC2 forward primer
  source 1..20: mol_type = other DNA
ctcccccactacttgttctt

SEQ ID NO: 2486 - DNA, 25 bp, synthetic construct
  misc_feature 1..25: note = Synthetic: ERC2 reverse primer
  source 1..25: mol_type = other DNA
agaacaatcaccaatctggaaggta

SEQ ID NO: 2487 - DNA, 25 bp, synthetic construct
  misc_feature 1..25: note = Synthetic: ERBB4 forward primer
  source 1..25: mol_type = other DNA
ggcaaacgttctcctttctctaata

SEQ ID NO: 2488 - DNA, 32 bp, synthetic construct
  misc_feature 1..32: note = Synthetic: ERBB4 reverse primer
  source 1..32: mol_type = other DNA
caatataggagttactatatgggaactgatga

SEQ ID NO: 2489 - DNA, 25 bp, synthetic construct
  misc_feature 1..25: note = Synthetic: ERBB4 forward primer
  source 1..25: mol_type = other DNA
catcatagggttttcctccaaaggt

SEQ ID NO: 2490 - DNA, 28 bp, synthetic construct
  misc_feature 1..28: note = Synthetic: ERBB4 reverse primer
  source 1..28: mol_type = other DNA
tatagtgctggtttgttcaacatatgtt

SEQ ID NO: 2491 - DNA, 25 bp, synthetic construct
  misc_feature 1..25: note = Synthetic: ERBB3 forward primer
  source 1..25: mol_type = other DNA
atctgctctgtcacagtggattcga

SEQ ID NO: 2492 - DNA, 17 bp, synthetic construct
  misc_feature 1..17: note = Synthetic: ERBB3 reverse primer
  source 1..17: mol_type = other DNA
ggtccctcgcaccacgc

SEQ ID NO: 2493 - DNA, 23 bp, synthetic construct
  misc_feature 1..23: note = Synthetic: ERBB3 forward primer
  source 1..23: mol_type = other DNA
ctctaccattgcccaacctccgc

SEQ ID NO: 2494 - DNA, 24 bp, synthetic construct
  misc_feature 1..24: note = Synthetic: ERBB3 reverse primer
  source 1..24: mol_type = other DNA
ctggagttggtgttatagttcaac

SEQ ID NO: 2495 - DNA, 23 bp, synthetic construct
  misc_feature 1..23: note = Synthetic: ERBB2 forward primer
  source 1..23: mol_type = other DNA
tgaaaattccagtggccatcaaa

SEQ ID NO: 2496 - DNA, 23 bp, synthetic construct
  misc_feature 1..23: note = Synthetic: ERBB2 reverse primer
  source 1..23: mol_type = other DNA
gaggggcttacgtctaagatttc

SEQ ID NO: 2497 - DNA, 21 bp, synthetic construct
  misc_feature 1..21: note = Synthetic: ERBB2 forward primer
  source 1..21: mol_type = other DNA
agggaaaacacatcccccaaa

SEQ ID NO: 2498 - DNA, 18 bp, synthetic construct
  misc_feature 1..18: note = Synthetic: ERBB2 reverse primer
  source 1..18: mol_type = other DNA
gaccagagcccagacctg

SEQ ID NO: 2499 - DNA, 21 bp, synthetic construct
  misc_feature 1..21: note = Synthetic: ERBB2 forward primer
  source 1..21: mol_type = other DNA
ggtctcccataccctctcagc

SEQ ID NO: 2500 - DNA, 21 bp, synthetic construct
  misc_feature 1..21: note = Synthetic: ERBB2 reverse primer
  source 1..21: mol_type = other DNA
aaggcgggagacatatgggga

SEQ ID NO: 2501 - DNA, 22 bp, synthetic construct
  misc_feature 1..22: note = Synthetic: EPHA6 forward primer
  source 1..22: mol_type = other DNA
tgggatgccatcactgaaatgg

SEQ ID NO: 2502 - DNA, 19 bp, synthetic construct
  misc_feature 1..19: note = Synthetic: EPHA6 reverse primer
  source 1..19: mol_type = other DNA
gcatcacgggagatccagt

SEQ ID NO: 2503 - DNA, 23 bp, synthetic construct
  misc_feature 1..23: note = Synthetic: EPHA6 forward primer
  source 1..23: mol_type = other DNA
aaaacaactggcttcgtacaaac

SEQ ID NO: 2504 - DNA, 25 bp, synthetic construct
  misc_feature 1..25: note = Synthetic: EPHA6 reverse primer
  source 1..25: mol_type = other DNA
tgctgttacaatcccttagtgtgaa

SEQ ID NO: 2505 - DNA, 27 bp, synthetic construct
  misc_feature 1..27: note = Synthetic: EPHA6 forward primer
  source 1..27: mol_type = other DNA
ggacttgcaaagaaacatttaatctgt

SEQ ID NO: 2506 - DNA, 21 bp, synthetic construct
  misc_feature 1..21: note = Synthetic: EPHA6 reverse primer
  source 1..21: mol_type = other DNA
tgcgatcacccaaatccatct

SEQ ID NO: 2507 - DNA, 23 bp, synthetic construct
  misc_feature 1..23: note = Synthetic: EPHA6 forward primer
  source 1..23: mol_type = other DNA
tcgacacaattgctgctgatgag

SEQ ID NO: 2508 - DNA, 21 bp, synthetic construct
  misc_feature 1..21: note = Synthetic: EPHA6 reverse primer
  source 1..21: mol_type = other DNA
taggccccacctcacgaattt

SEQ ID NO: 2509 - DNA, 22 bp, synthetic construct
  misc_feature 1..22: note = Synthetic: EPHA6 forward primer
  source 1..22: mol_type = other DNA
ccttcactgttcgtaacttggc

SEQ ID NO: 2510 - DNA, 22 bp, synthetic construct
  misc_feature 1..22: note = Synthetic: EPHA6 reverse primer
  source 1..22: mol_type = other DNA
agaaccccgtacttcaaccaaa

SEQ ID NO: 2511 - DNA, 23 bp, synthetic construct
  misc_feature 1..23: note = Synthetic: EPHA6 forward primer
  source 1..23: mol_type = other DNA
ttccaagggttgattcctcctct

SEQ ID NO: 2512 - DNA, 23 bp, synthetic construct
  misc_feature 1..23: note = Synthetic: EPHA6 reverse primer
  source 1..23: mol_type = other DNA
ttaggagtgtcacgctcttcagc

SEQ ID NO: 2513 - DNA, 27 bp, synthetic construct
  misc_feature 1..27: note = Synthetic: EPHA5 forward primer
  source 1..27: mol_type = other DNA
ccataagacacaacttcccacattact

SEQ ID NO: 2514 - DNA, 33 bp, synthetic construct
  misc_feature 1..33: note = Synthetic: EPHA5 reverse primer
  source 1..33: mol_type = other DNA
atctttttcaattttagggaggaaaaattccaa

SEQ ID NO: 2515 - DNA, 20 bp, synthetic construct
  misc_feature 1..20: note = Synthetic: EPHA5 forward primer
  source 1..20: mol_type = other DNA
tattgcttctggggcagtcc

SEQ ID NO: 2516 - DNA, 22 bp, synthetic construct
  misc_feature 1..22: note = Synthetic: EPHA5 reverse primer
  source 1..22: mol_type = other DNA
acactgtccctaggcacatttg

SEQ ID NO: 2517 - DNA, 20 bp, synthetic construct
  misc_feature 1..20: note = Synthetic: EPHA5 forward primer
  source 1..20: mol_type = other DNA
gctctttctgccagcaatcc

SEQ ID NO: 2518 - DNA, 22 bp, synthetic construct
  misc_feature 1..22: note = Synthetic: EPHA5 reverse primer
  source 1..22: mol_type = other DNA
gtagaggaaggctatcgtctgc

SEQ ID NO: 2519 - DNA, 20 bp, synthetic construct
  misc_feature 1..20: note = Synthetic: EPHA5 forward primer
  source 1..20: mol_type = other DNA
agagcagcaggacaatccat

SEQ ID NO: 2520 - DNA, 20 bp, synthetic construct
  misc_feature 1..20: note = Synthetic: EPHA5 reverse primer
  source 1..20: mol_type = other DNA
gggtgctggttctgttttgc

SEQ ID NO: 2521 - DNA, 25 bp, synthetic construct
  misc_feature 1..25: note = Synthetic: EPHA5 forward primer
  source 1..25: mol_type = other DNA
ccctttttgcttagaggtcctacat

SEQ ID NO: 2522 - DNA, 25 bp, synthetic construct
  misc_feature 1..25: note = Synthetic: EPHA5 reverse primer
  source 1..25: mol_type = other DNA
aattgataccattgctgccgatgaa

SEQ ID NO: 2523 - DNA, 24 bp, synthetic construct
  misc_feature 1..24: note = Synthetic: EPHA5 forward primer
  source 1..24: mol_type = other DNA
tcaccaagatcaagttctgtaaag

SEQ ID NO: 2524 - DNA, 34 bp, synthetic construct
  misc_feature 1..34: note = Synthetic: EPHA5 reverse primer
  source 1..34: mol_type = other DNA
aacctttaatatgtattactttgagtcagatgat

SEQ ID NO: 2525 - DNA, 22 bp, synthetic construct
  misc_feature 1..22: note = Synthetic: EPHA5 forward primer
  source 1..22: mol_type = other DNA
cagatctggaggcaaactctta

SEQ ID NO: 2526 - DNA, 17 bp, synthetic construct
  misc_feature 1..17: note = Synthetic: EPHA5 reverse primer
  source 1..17: mol_type = other DNA
gcactgcagcgccgaag

SEQ ID NO: 2527 - DNA, 20 bp, synthetic construct
  misc_feature 1..20: note = Synthetic: EPHA5 forward primer
  source 1..20: mol_type = other DNA
catgcatttcccgatgggca

SEQ ID NO: 2528 - DNA, 23 bp, synthetic construct
  misc_feature 1..23: note = Synthetic: EPHA5 reverse primer
  source 1..23: mol_type = other DNA
accattctgtgaccgatgaacct

SEQ ID NO: 2529 - DNA, 24 bp, synthetic construct
  misc_feature 1..24: note = Synthetic: EPHA2 forward primer
  source 1..24: mol_type = other DNA
gagttaccttcttgcggtaagtga

SEQ ID NO: 2530 - DNA, 20 bp, synthetic construct
  misc_feature 1..20: note = Synthetic: EPHA2 reverse primer
  source 1..20: mol_type = other DNA
ttagcgtctcctggagcatc

SEQ ID NO: 2531 - DNA, 20 bp, synthetic construct
  misc_feature 1..20: note = Synthetic: EPB41L3 forward primer
  source 1..20: mol_type = other DNA
ttggtgcaaagcggaactca

SEQ ID NO: 2532 - DNA, 22 bp, synthetic construct
  misc_feature 1..22: note = Synthetic: EPB41L3 reverse primer
  source 1..22: mol_type = other DNA
tcctacactgtccagtcagagc

SEQ ID NO: 2533 - DNA, 22 bp, synthetic construct
  misc_feature 1..22: note = Synthetic: EPB41L3 forward primer
  source 1..22: mol_type = other DNA
ccacattcatctgggtcatagt

SEQ ID NO: 2534 - DNA, 21 bp, synthetic construct
  misc_feature 1..21: note = Synthetic: EPB41L3 reverse primer
  source 1..21: mol_type = other DNA
ctttgttaccctggccttgct

SEQ ID NO: 2535 - DNA, 34 bp, synthetic construct
  misc_feature 1..34: note = Synthetic: EP300 forward primer
  source 1..34: mol_type = other DNA
ttcatttctcttcattttgtataggagagtatac

SEQ ID NO: 2536 - DNA, 34 bp, synthetic construct
  misc_feature 1..34: note = Synthetic: EP300 reverse primer
  source 1..34: mol_type = other DNA
taaatatccaattaggatttcatgatagactgca

SEQ ID NO: 2537 - DNA, 26 bp, synthetic construct
  misc_feature 1..26: note = Synthetic: EP300 forward primer
  source 1..26: mol_type = other DNA
tcatttcttccgtcctaaatgcttga

SEQ ID NO: 2538 - DNA, 28 bp, synthetic construct
  misc_feature 1..28: note = Synthetic: EP300 reverse primer
  source 1..28: mol_type = other DNA
agaatgccatgctagttaaagaaaaaaa

SEQ ID NO: 2539 - DNA, 22 bp, synthetic construct
  misc_feature 1..22: note = Synthetic: EMILIN1 forward primer
  source 1..22: mol_type = other DNA
gttgtacctacaggaactggtg

SEQ ID NO: 2540 - DNA, 24 bp, synthetic construct
  misc_feature 1..24: note = Synthetic: EMILIN1 reverse primer
  source 1..24: mol_type = other DNA
aaggctggtacttgacatatgtct

SEQ ID NO: 2541 - DNA, 19 bp, synthetic construct
  misc_feature 1..19: note = Synthetic: EMILIN1 forward primer
  source 1..19: mol_type = other DNA
gacagtgagctgtgtcctt

SEQ ID NO: 2542 - DNA, 20 bp, synthetic construct
  misc_feature 1..20: note = Synthetic: EMILIN1 reverse primer
  source 1..20: mol_type = other DNA
cctgggactcacatgatgct

SEQ ID NO: 2543 - DNA, 20 bp, synthetic construct
  misc_feature 1..20: note = Synthetic: EMILIN1 forward primer
  source 1..20: mol_type = other DNA
ctgaccgtacagggaggaat

SEQ ID NO: 2544 - DNA, 20 bp, synthetic construct
  misc_feature 1..20: note = Synthetic: EMILIN1 reverse primer
  source 1..20: mol_type = other DNA
cactccatgtcggtcactgt

SEQ ID NO: 2545 - DNA, 19 bp, synthetic construct
  misc_feature 1..19: note = Synthetic: EMILIN1 forward primer
  source 1..19: mol_type = other DNA
accgtgtggcctacaagac

SEQ ID NO: 2546 - DNA, 20 bp, synthetic construct
  misc_feature 1..20: note = Synthetic: EMILIN1 reverse primer
  source 1..20: mol_type = other DNA
agtcatcgcccccataaccc

SEQ ID NO: 2547 - DNA, 27 bp, synthetic construct
  misc_feature 1..27: note = Synthetic: EGFR forward primer
  source 1..27: mol_type = other DNA
tcccagaaggtgagaaagttaaaattc

SEQ ID NO: 2548 - DNA, 25 bp, synthetic construct
  misc_feature 1..25: note = Synthetic: EGFR reverse primer
  source 1..25: mol_type = other DNA
actcacatcgaggatttccttgttg

SEQ ID NO: 2549 - DNA, 23 bp, synthetic construct
  misc_feature 1..23: note = Synthetic: EGFR forward primer
  source 1..23: mol_type = other DNA
agaagcaacatctccgaaagcca

SEQ ID NO: 2550 - DNA, 21 bp, synthetic construct
  misc_feature 1..21: note = Synthetic: EGFR reverse primer
  source 1..21: mol_type = other DNA
tgagaaaaggtgggcctgagg

SEQ ID NO: 2551 - DNA, 22 bp, synthetic construct
  misc_feature 1..22: note = Synthetic: EGFR forward primer
  source 1..22: mol_type = other DNA
aaaacaccgcagcatgtcaaga

SEQ ID NO: 2552 - DNA, 23 bp, synthetic construct
  misc_feature 1..23: note = Synthetic: EGFR reverse primer
  source 1..23: mol_type = other DNA
cctccttctgcatggtattcttt

SEQ ID NO: 2553 - DNA, 18 bp, synthetic construct
  misc_feature 1..18: note = Synthetic: EGFR forward primer
  source 1..18: mol_type = other DNA
cgagacgaagccacgtgc

SEQ ID NO: 2554 - DNA, 19 bp, synthetic construct
  misc_feature 1..19: note = Synthetic: EGFR reverse primer
  source 1..19: mol_type = other DNA
tcttcacgcaggtggcacc

SEQ ID NO: 2555 - DNA, 20 bp, synthetic construct
  misc_feature 1..20: note = Synthetic: EGFR forward primer
  source 1..20: mol_type = other DNA
aaccccgagggcaaatacag

SEQ ID NO: 2556 - DNA, 22 bp, synthetic construct
  misc_feature 1..22: note = Synthetic: EGFR reverse primer
  source 1..22: mol_type = other DNA
ggatgcctgaccagttagaggg

SEQ ID NO: 2557 - DNA, 23 bp, synthetic construct
  misc_feature 1..23: note = Synthetic: EGFLAM forward primer
  source 1..23: mol_type = other DNA
ctttgacatgccttgtgatgaaa

SEQ ID NO: 2558 - DNA, 19 bp, synthetic construct
  misc_feature 1..19: note = Synthetic: EGFLAM reverse primer
  source 1..19: mol_type = other DNA
ctctcaccacctttgccca

SEQ ID NO: 2559 - DNA, 17 bp, synthetic construct
  misc_feature 1..17: note = Synthetic: EGFLAM forward primer
  source 1..17: mol_type = other DNA
ctcgcgatgccagtgca

SEQ ID NO: 2560 - DNA, 17 bp, synthetic construct
  misc_feature 1..17: note = Synthetic: EGFLAM reverse primer
  source 1..17: mol_type = other DNA
ccaagggcctaccttct

SEQ ID NO: 2561 - DNA, 29 bp, synthetic construct
  misc_feature 1..29: note = Synthetic: EFHB forward primer
  source 1..29: mol_type = other DNA
ttcttcaccataattagttctgtcactga

SEQ ID NO: 2562 - DNA, 22 bp, synthetic construct
  misc_feature 1..22: note = Synthetic: EFHB reverse primer
  source 1..22: mol_type = other DNA
atttgtggtgttccaaccattc

SEQ ID NO: 2563 - DNA, 20 bp, synthetic construct
  misc_feature 1..20: note = Synthetic: EFHB forward primer
  source 1..20: mol_type = other DNA
aattcggggagcaggaatgt

SEQ ID NO: 2564 - DNA, 26 bp, synthetic construct
  misc_feature 1..26: note = Synthetic: EFHB reverse primer
  source 1..26: mol_type = other DNA
tccctcatcaatgacctaggttaccc

SEQ ID NO: 2565 - DNA, 21 bp, synthetic construct
  misc_feature 1..21: note = Synthetic: EDIL3 forward primer
  source 1..21: mol_type = other DNA
gggcactcacaggaatagtta

SEQ ID NO: 2566 - DNA, 28 bp, synthetic construct
  misc_feature 1..28: note = Synthetic: EDIL3 reverse primer
  source 1..28: mol_type = other DNA
tctgtcctttctgtttttcttagacata

SEQ ID NO: 2567 - DNA, 21 bp, synthetic construct
  misc_feature 1..21: note = Synthetic: EDIL3 forward primer
  source 1..21: mol_type = other DNA
ggctcaacttcgcattcattt

SEQ ID NO: 2568 - DNA, 27 bp, synthetic construct
  misc_feature 1..27: note = Synthetic: EDIL3 reverse primer
  source 1..27: mol_type = other DNA
acaaaggaatagcattactaagacatt

SEQ ID NO: 2569 - DNA, 21 bp, synthetic construct
  misc_feature 1..21: note = Synthetic: DUSP27 forward primer
  source 1..21: mol_type = other DNA
tctccaggtccacgtacaacg

SEQ ID NO: 2570 - DNA, 18 bp, synthetic construct
  misc_feature 1..18: note = Synthetic: DUSP27 reverse primer
  source 1..18: mol_type = other DNA
gtggttctggggactctt

SEQ ID NO: 2571 - DNA, 21 bp, synthetic construct
  misc_feature 1..21: note = Synthetic: DUSP27 forward primer
  source 1..21: mol_type = other DNA
gaccccagagtcctcagaaag

SEQ ID NO: 2572 - DNA, 24 bp, synthetic construct
  misc_feature 1..24: note = Synthetic: DUSP27 reverse primer
  source 1..24: mol_type = other DNA
tgacttggatgactcttccacatc

SEQ ID NO: 2573 - DNA, 21 bp, synthetic construct
  misc_feature 1..21: note = Synthetic: DUOX2 forward primer
  source 1..21: mol_type = other DNA
agaggccaccacaaattccgg

SEQ ID NO: 2574 - DNA, 21 bp, synthetic construct
  misc_feature 1..21: note = Synthetic: DUOX2 reverse primer
  source 1..21: mol_type = other DNA
agcctgtctccccatcatcac

SEQ ID NO: 2575 - DNA, 27 bp, synthetic construct
  misc_feature 1..27: note = Synthetic: DSG3 forward primer
  source 1..27: mol_type = other DNA
ccatgtaaaacctgtcattaggtcttt

SEQ ID NO: 2576 - DNA, 30 bp, synthetic construct
  misc_feature 1..30: note = Synthetic: DSG3 reverse primer
  source 1..30: mol_type = other DNA
ttcatccaaatctgttacttgaaatcgaag

SEQ ID NO: 2577 - DNA, 33 bp, synthetic construct
  misc_feature 1..33: note = Synthetic: DSG3 forward primer
  source 1..33: mol_type = other DNA
cacgtattgaagaaaatattttaagttctgaat

SEQ ID NO: 2578 - DNA, 32 bp, synthetic construct
  misc_feature 1..32: note = Synthetic: DSG3 reverse primer
  source 1..32: mol_type = other DNA
taaagaaatatactgcaagccaattatctgtg

SEQ ID NO: 2579 - DNA, 23 bp, synthetic construct
  misc_feature 1..23: note = Synthetic: DSCAM forward primer
  source 1..23: mol_type = other DNA
tgggtttgggttctttttcagcc

SEQ ID NO: 2580 - DNA, 17 bp, synthetic construct
  misc_feature 1..17: note = Synthetic: DSCAM reverse primer
  source 1..17: mol_type = other DNA
gacgggggcgcatacca

SEQ ID NO: 2581 - DNA, 19 bp, synthetic construct
  misc_feature 1..19: note = Synthetic: DSCAM forward primer
  source 1..19: mol_type = other DNA
ttgcgcacaaagcactggt

SEQ ID NO: 2582 - DNA, 21 bp, synthetic construct
  misc_feature 1..21: note = Synthetic: DSCAM reverse primer
  source 1..21: mol_type = other DNA
cacagggatcaaccacgaaaa

SEQ ID NO: 2583 - DNA, 25 bp, synthetic construct
  misc_feature 1..25: note = Synthetic: DSCAM forward primer
  source 1..25: mol_type = other DNA
gaaggattttcagctgtgcaataat

SEQ ID NO: 2584 - DNA, 19 bp, synthetic construct
  misc_feature 1..19: note = Synthetic: DSCAM reverse primer
  source 1..19: mol_type = other DNA
cgatgtccccgggatccgc

SEQ ID NO: 2585 - DNA, 23 bp, synthetic construct
  misc_feature 1..23: note = Synthetic: DSCAM forward primer
  source 1..23: mol_type = other DNA
aatttggagagtgccgttggggt

SEQ ID NO: 2586 - DNA, 24 bp, synthetic construct
  misc_feature 1..24: note = Synthetic: DSCAM reverse primer
  source 1..24: mol_type = other DNA
tgactctcagatggtacctagcca

SEQ ID NO: 2587 - DNA, 23 bp, synthetic construct
  misc_feature 1..23: note = Synthetic: DPP10 forward primer
  source 1..23: mol_type = other DNA
gccagtgtgctacataatgttca

SEQ ID NO: 2588 - DNA, 25 bp, synthetic construct
  misc_feature 1..25: note = Synthetic: DPP10 reverse primer
  source 1..25: mol_type = other DNA
acagcagcggcaagtataatactta

SEQ ID NO: 2589 - DNA, 19 bp, synthetic construct
  misc_feature 1..19: note = Synthetic: DPF3 forward primer
  source 1..19: mol_type = other DNA
ggacaccagctcttcaggc

SEQ ID NO: 2590 - DNA, 21 bp, synthetic construct
  misc_feature 1..21: note = Synthetic: DPF3 reverse primer
  source 1..21: mol_type = other DNA
atggaacagtcattcccaata

SEQ ID NO: 2591 - DNA, 22 bp, synthetic construct
  misc_feature 1..22: note = Synthetic: DPF3 forward primer
  source 1..22: mol_type = other DNA
aagcagaagtcacagtagttat

SEQ ID NO: 2592 - DNA, 23 bp, synthetic construct
  misc_feature 1..23: note = Synthetic: DPF3 reverse primer
  source 1..23: mol_type = other DNA
aatgttcccacagcccagaaagg

SEQ ID NO: 2593 - DNA, 21 bp, synthetic construct
  misc_feature 1..21: note = Synthetic: DOCK5 forward primer
  source 1..21: mol_type = other DNA
ttgttcctggccaatagctca

SEQ ID NO: 2594 - DNA, 22 bp, synthetic construct
  misc_feature 1..22: note = Synthetic: DOCK5 reverse primer
  source 1..22: mol_type = other DNA
cagatcttcaactctggcacct

SEQ ID NO: 2595 - DNA, 21 bp, synthetic construct
  misc_feature 1..21: note = Synthetic: DOCK3 forward primer
  source 1..21: mol_type = other DNA
tccctacactttgacgccttc

SEQ ID NO: 2596 - DNA, 21 bp, synthetic construct
  misc_feature 1..21: note = Synthetic: DOCK3 reverse primer
  source 1..21: mol_type = other DNA
tacattaccttgcgcagggtc

SEQ ID NO: 2597 - DNA, 24 bp, synthetic construct
  misc_feature 1..24: note = Synthetic: DNAH5 forward primer
  source 1..24: mol_type = other DNA
catccatgtcatccaagtggtttt

SEQ ID NO: 2598 - DNA, 18 bp, synthetic construct
  misc_feature 1..18: note = Synthetic: DNAH5 reverse primer
  source 1..18: mol_type = other DNA
ccaggagaggcgcaagtt

SEQ ID NO: 2599 - DNA, 25 bp, synthetic construct
  misc_feature 1..25: note = Synthetic: DNAH5 forward primer
  source 1..25: mol_type = other DNA
cttggttaaattcgtaggggatatt

SEQ ID NO: 2600 - DNA, 20 bp, synthetic construct
  misc_feature 1..20: note = Synthetic: DNAH5 reverse primer
  source 1..20: mol_type = other DNA
tggaagcccatgctgtacgc

SEQ ID NO: 2601 - DNA, 21 bp, synthetic construct
  misc_feature 1..21: note = Synthetic: DNAH5 forward primer
  source 1..21: mol_type = other DNA
ccctcgtggtgacgtctatca

SEQ ID NO: 2602 - DNA, 25 bp, synthetic construct
  misc_feature 1..25: note = Synthetic: DNAH5 reverse primer
  source 1..25: mol_type = other DNA
agcccttagaaatgccaagtttgat

SEQ ID NO: 2603 - DNA, 26 bp, synthetic construct
  misc_feature 1..26: note = Synthetic: DNAH5 forward primer
  source 1..26: mol_type = other DNA
aaagcctgattagttttctgcatgat

SEQ ID NO: 2604 - DNA, 32 bp, synthetic construct
  misc_feature 1..32: note = Synthetic: DNAH5 reverse primer
  source 1..32: mol_type = other DNA
ataaggttggattattaggaattcagatgata

SEQ ID NO: 2605 - DNA, 26 bp, synthetic construct
  misc_feature 1..26: note = Synthetic: DNAH5 forward primer
  source 1..26: mol_type = other DNA
aaaggaatgtggcacatgtgtaaatg

SEQ ID NO: 2606 - DNA, 25 bp, synthetic construct
  misc_feature 1..25: note = Synthetic: DNAH5 reverse primer
  source 1..25: mol_type = other DNA
ttgagtaaagaactggaagcgaaag

SEQ ID NO: 2607 - DNA, 23 bp, synthetic construct
  misc_feature 1..23: note = Synthetic: DNAH5 forward primer
  source 1..23: mol_type = other DNA
ttatcgttggccacttgtagctc

SEQ ID NO: 2608 - DNA, 25 bp, synthetic construct
  misc_feature 1..25: note = Synthetic: DNAH5 reverse primer
  source 1..25: mol_type = other DNA
aaagctcaaagaagcttcagagtct

SEQ ID NO: 2609 - DNA, 25 bp, synthetic construct
  misc_feature 1..25: note = Synthetic: DNAH5 forward primer
  source 1..25: mol_type = other DNA
agcactgactttcctttgaaacagc

SEQ ID NO: 2610 - DNA, 20 bp, synthetic construct
  misc_feature 1..20: note = Synthetic: DNAH5 reverse primer
  source 1..20: mol_type = other DNA
cggacatcgccactgttcgc

SEQ ID NO: 2611 - DNA, 20 bp, synthetic construct
  misc_feature 1..20: note = Synthetic: DMBT1 forward primer
  source 1..20: mol_type = other DNA
gccgagtggaggtcctatac

SEQ ID NO: 2612 - DNA, 18 bp, synthetic construct
  misc_feature 1..18: note = Synthetic: DMBT1 reverse primer
  source 1..18: mol_type = other DNA
gagccctgaccaaaccgg

SEQ ID NO: 2613 - DNA, 18 bp, synthetic construct
  misc_feature 1..18: note = Synthetic: DMBT1 forward primer
  source 1..18: mol_type = other DNA
tgtcagccccaggaaatg

SEQ ID NO: 2614 - DNA, 18 bp, synthetic construct
  misc_feature 1..18: note = Synthetic: DMBT1 reverse primer
  source 1..18: mol_type = other DNA
cagctccacaggtaagac

SEQ ID NO: 2615 - DNA, 22 bp, synthetic construct
  misc_feature 1..22: note = Synthetic: DLGAP2 forward primer
  source 1..22: mol_type = other DNA
aggcgacatgtaggactttgtt

SEQ ID NO: 2616 - DNA, 18 bp, synthetic construct
  misc_feature 1..18: note = Synthetic: DLGAP2 reverse primer
  source 1..18: mol_type = other DNA
gaacccctccagctccag

SEQ ID NO: 2617 - DNA, 17 bp, synthetic construct
  misc_feature 1..17: note = Synthetic: DLGAP2 forward primer
  source 1..17: mol_type = other DNA
ccgccgtccaagctgac

SEQ ID NO: 2618 - DNA, 20 bp, synthetic construct
  misc_feature 1..20: note = Synthetic: DLGAP2 reverse primer
  source 1..20: mol_type = other DNA
ccgaactgaaggcctttgtc

SEQ ID NO: 2619 - DNA, 22 bp, synthetic construct
  misc_feature 1..22: note = Synthetic: DLG2 forward primer
  source 1..22: mol_type = other DNA
gctacatggtgttgcctttgtt

SEQ ID NO: 2620 - DNA, 18 bp, synthetic construct
  misc_feature 1..18: note = Synthetic: DLG2 reverse primer
  source 1..18: mol_type = other DNA
ggatccctgcgaaccaat

SEQ ID NO: 2621 - DNA, 21 bp, synthetic construct
  misc_feature 1..21: note = Synthetic: DLG2 forward primer
  source 1..21: mol_type = other DNA
cgtagagggagcgtttctgat

SEQ ID NO: 2622 - DNA, 22 bp, synthetic construct
  misc_feature 1..22: note = Synthetic: DLG2 reverse primer
  source 1..22: mol_type = other DNA
atgacctacgagagcagatgat

SEQ ID NO: 2623 - DNA, 24 bp, synthetic construct
  misc_feature 1..24: note = Synthetic: DKK2 forward primer
  source 1..24: mol_type = other DNA
gtaaggagacgatagcctgacttg

SEQ ID NO: 2624 - DNA, 17 bp, synthetic construct
  misc_feature 1..17: note = Synthetic: DKK2 reverse primer
  source 1..17: mol_type = other DNA
agcgctgccaccgagat

SEQ ID NO: 2625 - DNA, 18 bp, synthetic construct
  misc_feature 1..18: note = Synthetic: DKK2 forward primer
  source 1..18: mol_type = other DNA
actggggcagcacatgcc

SEQ ID NO: 2626 - DNA, 24 bp, synthetic construct
  misc_feature 1..24: note = Synthetic: DKK2 reverse primer
  source 1..24: mol_type = other DNA
gtgtgaagttgggaggtattgcca

SEQ ID NO: 2627 - DNA, 21 bp, synthetic construct
  misc_feature 1..21: note = Synthetic: DKK2 forward primer
  source 1..21: mol_type = other DNA
ggagcactggtttgcagattt

SEQ ID NO: 2628 - DNA, 20 bp, synthetic construct
  misc_feature 1..20: note = Synthetic: DKK2 reverse primer
  source 1..20: mol_type = other DNA
cccctgcctacgatcatcag

SEQ ID NO: 2629 - DNA, 22 bp, synthetic construct
  misc_feature 1..22: note = Synthetic: DKK2 forward primer
  source 1..22: mol_type = other DNA
gcacagcaaaacccttcaatgc

SEQ ID NO: 2630 - DNA, 26 bp, synthetic construct
  misc_feature 1..26: note = Synthetic: DKK2 reverse primer
  source 1..26: mol_type = other DNA
cagggtaacatctattggtcatcatc

SEQ ID NO: 2631 - DNA, 24 bp, synthetic construct
  misc_feature 1..24: note = Synthetic: DKK2 forward primer
  source 1..24: mol_type = other DNA
gtaggtggcatctttccatacttt

SEQ ID NO: 2632 - DNA, 21 bp, synthetic construct
  misc_feature 1..21: note = Synthetic: DKK2 reverse primer
  source 1..21: mol_type = other DNA
ttctcatgggctggaaatttt

SEQ ID NO: 2633 - DNA, 18 bp, synthetic construct
  misc_feature 1..18: note = Synthetic: DKK2 forward primer
  source 1..18: mol_type = other DNA
gacaggcccttcgcacag

SEQ ID NO: 2634 - DNA, 22 bp, synthetic construct
  misc_feature 1..22: note = Synthetic: DKK2 reverse primer
  source 1..22: mol_type = other DNA
agtctgtaccaaacaacgcaag

SEQ ID NO: 2635 - DNA, 31 bp, synthetic construct
  misc_feature 1..31: note = Synthetic: DGKI forward primer
  source 1..31: mol_type = other DNA
cagtgaattggcaataagtaatatgtagtaa

SEQ ID NO: 2636 - DNA, 26 bp, synthetic construct
  misc_feature 1..26: note = Synthetic: DGKI reverse primer
  source 1..26: mol_type = other DNA
tacttttcctctttcacagaagcaaa

SEQ ID NO: 2637 - DNA, 30 bp, synthetic construct
  misc_feature 1..30: note = Synthetic: DGKI forward primer
  source 1..30: mol_type = other DNA
catagaacattttatttcgaaaacgactgt

SEQ ID NO: 2638 - DNA, 27 bp, synthetic construct
  misc_feature 1..27: note = Synthetic: DGKI reverse primer
  source 1..27: mol_type = other DNA
tacctttagtgaggtctccataacaaa

SEQ ID NO: 2639 - DNA, 26 bp, synthetic construct
  misc_feature 1..26: note = Synthetic: DGKI forward primer
  source 1..26: mol_type = other DNA
ggtaagtgatccttggtaagttcact

SEQ ID NO: 2640 - DNA, 22 bp, synthetic construct
  misc_feature 1..22: note = Synthetic: DGKI reverse primer
  source 1..22: mol_type = other DNA
tccttcactacgcagctaaaac

SEQ ID NO: 2641 - DNA, 21 bp, synthetic construct
  misc_feature 1..21: note = Synthetic: DGKI forward primer
  source 1..21: mol_type = other DNA
tatttcacaatctccccgttg

SEQ ID NO: 2642 - DNA, 20 bp, synthetic construct
  misc_feature 1..20: note = Synthetic: DGKI reverse primer
  source 1..20: mol_type = other DNA
cagggaccagaccactgttc

SEQ ID NO: 2643 - DNA, 23 bp, synthetic construct
  misc_feature 1..23: note = Synthetic: DEFB118 forward primer
  source 1..23: mol_type = other DNA
tgcaggaaacaatgcaaagatgg

SEQ ID NO: 2644 - DNA, 20 bp, synthetic construct
  misc_feature 1..20: note = Synthetic: DEFB118 reverse primer
  source 1..20: mol_type = other DNA
cctgtggtcttcattggatg

SEQ ID NO: 2645 - DNA, 24 bp, synthetic construct
  misc_feature 1..24: note = Synthetic: DEFB118 forward primer
  source 1..24: mol_type = other DNA
gaagcagtgaaagatacatgcaaa

SEQ ID NO: 2646 - DNA, 21 bp, synthetic construct
  misc_feature 1..21: note = Synthetic: DEFB118 reverse primer
  source 1..21: mol_type = other DNA
caagggtgtgggagatgtcgc

SEQ ID NO: 2647 - DNA, 24 bp, synthetic construct
  misc_feature 1..24: note = Synthetic: DDX50 forward primer
  source 1..24: mol_type = other DNA
gaaggaagtcaaggcaccattatg

SEQ ID NO: 2648 - DNA, 25 bp, synthetic construct
  misc_feature 1..25: note = Synthetic: DDX50 reverse primer
  source 1..25: mol_type = other DNA
tccaggtcatctgtaacaccatttt

SEQ ID NO: 2649 - DNA, 18 bp, synthetic construct
  misc_feature 1..18: note = Synthetic: DCT forward primer
  source 1..18: mol_type = other DNA
cccaccaagcttggagca

SEQ ID NO: 2650 - DNA, 17 bp, synthetic construct
  misc_feature 1..17: note = Synthetic: DCT reverse primer
  source 1..17: mol_type = other DNA
cacaaggccctggagtg

SEQ ID NO: 2651 - DNA, 24 bp, synthetic construct
  misc_feature 1..24: note = Synthetic: DCT forward primer
  source 1..24: mol_type = other DNA
catcctggtttcgtaggatgtagg

SEQ ID NO: 2652 - DNA, 21 bp, synthetic construct
  misc_feature 1..21: note = Synthetic: DCT reverse primer
  source 1..21: mol_type = other DNA
caatgtctgtggctctcagca

SEQ ID NO: 2653 - DNA, 23 bp, synthetic construct
  misc_feature 1..23: note = Synthetic: DCC forward primer
  source 1..23: mol_type = other DNA
cttcctacccaattcttacctat

SEQ ID NO: 2654 - DNA, 20 bp, synthetic construct
  misc_feature 1..20: note = Synthetic: DCC reverse primer
  source 1..20: mol_type = other DNA
cggacaaatcggctggaaac

SEQ ID NO: 2655 - DNA, 19 bp, synthetic construct
  misc_feature 1..19: note = Synthetic: DCC forward primer
  source 1..19: mol_type = other DNA
cggctcccagagatgtggt

SEQ ID NO: 2656 - DNA, 24 bp, synthetic construct
  misc_feature 1..24: note = Synthetic: DCC reverse primer
  source 1..24: mol_type = other DNA
gtgaaagtttgaatgttccctttc

SEQ ID NO: 2657 - DNA, 20 bp, synthetic construct
  misc_feature 1..20: note = Synthetic: DCC forward primer
  source 1..20: mol_type = other DNA
atgtgaggccccagactaac

SEQ ID NO: 2658 - DNA, 24 bp, synthetic construct
  misc_feature 1..24: note = Synthetic: DCC reverse primer
  source 1..24: mol_type = other DNA
cccaacgccataaccgataatata

SEQ ID NO: 2659 - DNA, 21 bp, synthetic construct
  misc_feature 1..21: note = Synthetic: DCC forward primer
  source 1..21: mol_type = other DNA
ggactcctcccttgaacccaa

SEQ ID NO: 2660 - DNA, 19 bp, synthetic construct
  misc_feature 1..19: note = Synthetic: DCC reverse primer
  source 1..19: mol_type = other DNA
ccacacgcactgtctcagc

SEQ ID NO: 2661 - DNA, 19 bp, synthetic construct
  misc_feature 1..19: note = Synthetic: DCC forward primer
  source 1..19: mol_type = other DNA
ctatgctgcccccatctca

SEQ ID NO: 2662 - DNA, 18 bp, synthetic construct
  misc_feature 1..18: note = Synthetic: DCC reverse primer
  source 1..18: mol_type = other DNA
aagctgcggagtgggtga

SEQ ID NO: 2663 - DNA, 20 bp, synthetic construct
  misc_feature 1..20: note = Synthetic: DCC forward primer
  source 1..20: mol_type = other DNA
ggcaccaagcagaaccatcc

SEQ ID NO: 2664 - DNA, 24 bp, synthetic construct
  misc_feature 1..24: note = Synthetic: DCC reverse primer
  source 1..24: mol_type = other DNA
ggtggaggtagcaaaggattagca

SEQ ID NO: 2665 - DNA, 20 bp, synthetic construct
  misc_feature 1..20: note = Synthetic: DCAF4L2 forward primer
  source 1..20: mol_type = other DNA
ggtatggttgtgagcaggtg

SEQ ID NO: 2666 - DNA, 20 bp, synthetic construct
  misc_feature 1..20: note = Synthetic: DCAF4L2 reverse primer
  source 1..20: mol_type = other DNA
ccgtgcatgtgaacgaagaa

SEQ ID NO: 2667 - DNA, 23 bp, synthetic construct
  misc_feature 1..23: note = Synthetic: DCAF4L2 forward primer
  source 1..23: mol_type = other DNA
aagagctggtcagtgttggtatt

SEQ ID NO: 2668 - DNA, 18 bp, synthetic construct
  misc_feature 1..18: note = Synthetic: DCAF4L2 reverse primer
  source 1..18: mol_type = other DNA
gagctgcgtgtaagctgc

SEQ ID NO: 2669 - DNA, 25 bp, synthetic construct
  misc_feature 1..25: note = Synthetic: DCAF4L2 forward primer
  source 1..25: mol_type = other DNA
agctatgaatctggacctttttcct

SEQ ID NO: 2670 - DNA, 23 bp, synthetic construct
  misc_feature 1..23: note = Synthetic: DCAF4L2 reverse primer
  source 1..23: mol_type = other DNA
cctcagattcgccaactattgcc

SEQ ID NO: 2671 - DNA, 20 bp, synthetic construct
  misc_feature 1..20: note = Synthetic: DCAF4L2 forward primer
  source 1..20: mol_type = other DNA
cattcctgggaagctaccta

SEQ ID NO: 2672 - DNA, 18 bp, synthetic construct
  misc_feature 1..18: note = Synthetic: DCAF4L2 reverse primer
  source 1..18: mol_type = other DNA
gctgtgcttcgtgggact

SEQ ID NO: 2673 - DNA, 19 bp, synthetic construct
  misc_feature 1..19: note = Synthetic: DCAF4L2 forward primer
  source 1..19: mol_type = other DNA
cggcacagcttggagtatc

SEQ ID NO: 2674 - DNA, 24 bp, synthetic construct
  misc_feature 1..24: note = Synthetic: DCAF4L2 reverse primer
  source 1..24: mol_type = other DNA
aaaaccctctacgtccctaatcgg

SEQ ID NO: 2675 - DNA, 20 bp, synthetic construct
  misc_feature 1..20: note = Synthetic: DCAF4L2 forward primer
  source 1..20: mol_type = other DNA
tgaggcccagcacatagaat

SEQ ID NO: 2676 - DNA, 19 bp, synthetic construct
  misc_feature 1..19: note = Synthetic: DCAF4L2 reverse primer
  source 1..19: mol_type = other DNA
ggcatcatcaccatgcgag

SEQ ID NO: 2677 - DNA, 22 bp, synthetic construct
  misc_feature 1..22: note = Synthetic: DCAF4L2 forward primer
  source 1..22: mol_type = other DNA
cgcagatcaatgccaaagatct

SEQ ID NO: 2678 - DNA, 20 bp, synthetic construct
  misc_feature 1..20: note = Synthetic: DCAF4L2 reverse primer
  source 1..20: mol_type = other DNA
gtcttggcccagcagtttgc

SEQ ID NO: 2679 - DNA, 23 bp, synthetic construct
  misc_feature 1..23: note = Synthetic: DCAF4L2 forward primer
  source 1..23: mol_type = other DNA
gacagccattaaacagcaaagga

SEQ ID NO: 2680 - DNA, 22 bp, synthetic construct
  misc_feature 1..22: note = Synthetic: DCAF4L2 reverse primer
  source 1..22: mol_type = other DNA
cagcagtcatttgggactagca

SEQ ID NO: 2681 - DNA, 19 bp, synthetic construct
  misc_feature 1..19: note = Synthetic: DAZAP1 forward primer
  source 1..19: mol_type = other DNA
gtgtttcaggtggctatgg

SEQ ID NO: 2682 - DNA, 18 bp, synthetic construct
  misc_feature 1..18: note = Synthetic: DAZAP1 reverse primer
  source 1..18: mol_type = other DNA
ggaggggtggacacgatg

SEQ ID NO: 2683 - DNA, 17 bp, synthetic construct
  misc_feature 1..17: note = Synthetic: DAZAP1 forward primer
  source 1..17: mol_type = other DNA
gccacccccaccgttca

SEQ ID NO: 2684 - DNA, 17 bp, synthetic construct
  misc_feature 1..17: note = Synthetic: DAZAP1 reverse primer
  source 1..17: mol_type = other DNA
ctggggagggggaaagc

SEQ ID NO: 2685 - DNA, 22 bp, synthetic construct
  misc_feature 1..22: note = Synthetic: DARC forward primer
  source 1..22: mol_type = other DNA
gttcacttccttttgctaagcc

SEQ ID NO: 2686 - DNA, 20 bp, synthetic construct
  misc_feature 1..20: note = Synthetic: DARC reverse primer
  source 1..20: mol_type = other DNA
ggggttgatggcatctccat

SEQ ID NO: 2687 - DNA, 21 bp, synthetic construct
  misc_feature 1..21: note = Synthetic: DACH1 forward primer
  source 1..21: mol_type = other DNA
ctgctgccatatttgcaatgg

SEQ ID NO: 2688 - DNA, 20 bp, synthetic construct
  misc_feature 1..20: note = Synthetic: DACH1 reverse primer
  source 1..20: mol_type = other DNA
tcctgtcagcctacctccag

SEQ ID NO: 2689 - DNA, 22 bp, synthetic construct
  misc_feature 1..22: note = Synthetic: DACH1 forward primer
  source 1..22: mol_type = other DNA
ctcattgccatggtgacagatg

SEQ ID NO: 2690 - DNA, 27 bp, synthetic construct
  misc_feature 1..27: note = Synthetic: DACH1 reverse primer
  source 1..27: mol_type = other DNA
atgatttatgtcctccagagcaatgat

SEQ ID NO: 2691 - DNA, 25 bp, synthetic construct
  misc_feature 1..25: note = Synthetic: DACH1 forward primer
  source 1..25: mol_type = other DNA
cagtcttacctgttggtggaattat

SEQ ID NO: 2692 - DNA, 21 bp, synthetic construct
  misc_feature 1..21: note = Synthetic: DACH1 reverse primer
  source 1..21: mol_type = other DNA
caaagtgtcacctccccagag

SEQ ID NO: 2693 - DNA, 23 bp, synthetic construct
  misc_feature 1..23: note = Synthetic: DACH1 forward primer
  source 1..23: mol_type = other DNA
acatgagaccagggacagaatgc

SEQ ID NO: 2694 - DNA, 27 bp, synthetic construct
  misc_feature 1..27: note = Synthetic: DACH1 reverse primer
  source 1..27: mol_type = other DNA
tttgtttcagttctagacctggaaggc

SEQ ID NO: 2695 - DNA, 21 bp, synthetic construct
  misc_feature 1..21: note = Synthetic: CYP7B1 forward primer
  source 1..21: mol_type = other DNA
gaggtggatgggaaatccaga

SEQ ID NO: 2696 - DNA, 20 bp, synthetic construct
  misc_feature 1..20: note = Synthetic: CYP7B1 reverse primer
  source 1..20: mol_type = other DNA
agctatggcagcagtgcgtg

SEQ ID NO: 2697 - DNA, 22 bp, synthetic construct
  misc_feature 1..22: note = Synthetic: CYP7B1 forward primer
  source 1..22: mol_type = other DNA
gcagcaaacggtcaatttcgtc

SEQ ID NO: 2698 - DNA, 27 bp, synthetic construct
  misc_feature 1..27: note = Synthetic: CYP7B1 reverse primer
  source 1..27: mol_type = other DNA
aactatgttctgggcaatgtattatct

SEQ ID NO: 2699 - DNA, 19 bp, synthetic construct
  misc_feature 1..19: note = Synthetic: CYC1 forward primer
  source 1..19: mol_type = other DNA
gccttgtcgtcgaagtctg

SEQ ID NO: 2700 - DNA, 17 bp, synthetic construct
  misc_feature 1..17: note = Synthetic: CYC1 reverse primer
  source 1..17: mol_type = other DNA
gtgcagctccaggtcac

SEQ ID NO: 2701 - DNA, 20 bp, synthetic construct
  misc_feature 1..20: note = Synthetic: CYC1 forward primer
  source 1..20: mol_type = other DNA
tctgcattcggctgtgagtg

SEQ ID NO: 2702 - DNA, 21 bp, synthetic construct
  misc_feature 1..21: note = Synthetic: CYC1 reverse primer
  source 1..21: mol_type = other DNA
tggtgtggtccaaggaagaga

SEQ ID NO: 2703 - DNA, 20 bp, synthetic construct
  misc_feature 1..20: note = Synthetic: CTTNBP2 forward primer
  source 1..20: mol_type = other DNA
gctgcacttgctgtttgtta

SEQ ID NO: 2704 - DNA, 18 bp, synthetic construct
  misc_feature 1..18: note = Synthetic: CTTNBP2 reverse primer
  source 1..18: mol_type = other DNA
catttccgctgggtgcag

SEQ ID NO: 2705 - DNA, 23 bp, synthetic construct
  misc_feature 1..23: note = Synthetic: CTNNB1 forward primer
  source 1..23: mol_type = other DNA
acagaaaagcggctgttagtcac

SEQ ID NO: 2706 - DNA, 22 bp, synthetic construct
  misc_feature 1..22: note = Synthetic: CTNNB1 reverse primer
  source 1..22: mol_type = other DNA
tcttcctcaggattgcctttac

SEQ ID NO: 2707 - DNA, 22 bp, synthetic construct
  misc_feature 1..22: note = Synthetic: CTNNB1 forward primer
  source 1..22: mol_type = other DNA
atccattctggtgccactacca

SEQ ID NO: 2708 - DNA, 22 bp, synthetic construct
  misc_feature 1..22: note = Synthetic: CTNNB1 reverse primer
  source 1..22: mol_type = other DNA
ggacttgggaggtatccacatc

SEQ ID NO: 2709 - DNA, 25 bp, synthetic construct
  misc_feature 1..25: note = Synthetic: CTNNA2 forward primer
  source 1..25: mol_type = other DNA
aaaggcccattgaaaaatacatctg

SEQ ID NO: 2710 - DNA, 20 bp, synthetic construct
  misc_feature 1..20: note = Synthetic: CTNNA2 reverse primer
  source 1..20: mol_type = other DNA
cacagcacgagctaatttgt

SEQ ID NO: 2711 - DNA, 20 bp, synthetic construct
  misc_feature 1..20: note = Synthetic: CTNNA2 forward primer
  source 1..20: mol_type = other DNA
cgaagcaggttctcgaatgg

SEQ ID NO: 2712 - DNA, 23 bp, synthetic construct
  misc_feature 1..23: note = Synthetic: CTNNA2 reverse primer
  source 1..23: mol_type = other DNA
cacccttccctcttctattacct

SEQ ID NO: 2713 - DNA, 21 bp, synthetic construct
  misc_feature 1..21: note = Synthetic: CTNNA2 forward primer
  source 1..21: mol_type = other DNA
tgtgacagctttcatgtgtta

SEQ ID NO: 2714 - DNA, 24 bp, synthetic construct
  misc_feature 1..24: note = Synthetic: CTNNA2 reverse primer
  source 1..24: mol_type = other DNA
tgtacagcattgtggcattcttct

SEQ ID NO: 2715 - DNA, 34 bp, synthetic construct
  misc_feature 1..34: note = Synthetic: CTNNA2 forward primer
  source 1..34: mol_type = other DNA
cattttgaatcaccaaagttacaatttatttcaa

SEQ ID NO: 2716 - DNA, 22 bp, synthetic construct
  misc_feature 1..22: note = Synthetic: CTNNA2 reverse primer
  source 1..22: mol_type = other DNA
ttagcgtccggatttccaaact

SEQ ID NO: 2717 - DNA, 25 bp, synthetic construct
  misc_feature 1..25: note = Synthetic: CTNNA2 forward primer
  source 1..25: mol_type = other DNA
atcattctgaaatgggaccccaaaa

SEQ ID NO: 2718 - DNA, 23 bp, synthetic construct
  misc_feature 1..23: note = Synthetic: CTNNA2 reverse primer
  source 1..23: mol_type = other DNA
gtttcaaagcatcccttacctgt

SEQ ID NO: 2719 - DNA, 21 bp, synthetic construct
  misc_feature 1..21: note = Synthetic: CTNNA2 forward primer
  source 1..21: mol_type = other DNA
ggatgcagaagtggccaaatg

SEQ ID NO: 2720 - DNA, 27 bp, synthetic construct
  misc_feature 1..27: note = Synthetic: CTNNA2 reverse primer
  source 1..27: mol_type = other DNA
tgaagtctgtcatttccatcatgatca

SEQ ID NO: 2721 - DNA, 21 bp, synthetic construct
  misc_feature 1..21: note = Synthetic: CTNNA2 forward primer
  source 1..21: mol_type = other DNA
tactggccaagcagatgtgta

SEQ ID NO: 2722 - DNA, 25 bp, synthetic construct
  misc_feature 1..25: note = Synthetic: CTNNA2 reverse primer
  source 1..25: mol_type = other DNA
actgctacacttctgggtttaatga

SEQ ID NO: 2723 - DNA, 19 bp, synthetic construct
  misc_feature 1..19: note = Synthetic: CTNNA2 forward primer
  source 1..19: mol_type = other DNA
caaggcagacctctcttct

SEQ ID NO: 2724 - DNA, 17 bp, synthetic construct
  misc_feature 1..17: note = Synthetic: CTNNA2 reverse primer
  source 1..17: mol_type = other DNA
ccgctgatgatgctctc

SEQ ID NO: 2725 - DNA, 18 bp, synthetic construct
  misc_feature 1..18: note = Synthetic: CTNNA2 forward primer
  source 1..18: mol_type = other DNA
ttcagcgaggccaggttc

SEQ ID NO: 2726 - DNA, 17 bp, synthetic construct
  misc_feature 1..17: note = Synthetic: CTNNA2 reverse primer
  source 1..17: mol_type = other DNA
actccgccacgatcctc

SEQ ID NO: 2727 - DNA, 17 bp, synthetic construct
  misc_feature 1..17: note = Synthetic: CTNNA2 forward primer
  source 1..17: mol_type = other DNA
ctgatggccgactcctc

SEQ ID NO: 2728 - DNA, 18 bp, synthetic construct
  misc_feature 1..18: note = Synthetic: CTNNA2 reverse primer
  source 1..18: mol_type = other DNA
tgagcaggtcctggagcg

SEQ ID NO: 2729 - DNA, 23 bp, synthetic construct
  misc_feature 1..23: note = Synthetic: CSNK1A1L forward primer
  source 1..23: mol_type = other DNA
tgtgctgctttctgctttaacat

SEQ ID NO: 2730 - DNA, 21 bp, synthetic construct
  misc_feature 1..21: note = Synthetic: CSNK1A1L reverse primer
  source 1..21: mol_type = other DNA
ggcagctattccgcattcttt

SEQ ID NO: 2731 - DNA, 24 bp, synthetic construct
  misc_feature 1..24: note = Synthetic: CSNK1A1L forward primer
  source 1..24: mol_type = other DNA
gtcatattggtggttcagggtcct

SEQ ID NO: 2732 - DNA, 23 bp, synthetic construct
  misc_feature 1..23: note = Synthetic: CSNK1A1L reverse primer
  source 1..23: mol_type = other DNA
tttgaggaagtcccagattacat

SEQ ID NO: 2733 - DNA, 28 bp, synthetic construct
  misc_feature 1..28: note = Synthetic: CSMD3 forward primer
  source 1..28: mol_type = other DNA
tataccttgatagggagcactaaatcca

SEQ ID NO: 2734 - DNA, 23 bp, synthetic construct
  misc_feature 1..23: note = Synthetic: CSMD3 reverse primer
  source 1..23: mol_type = other DNA
aacaaaaactggctcagactgca

SEQ ID NO: 2735 - DNA, 23 bp, synthetic construct
  misc_feature 1..23: note = Synthetic: CSMD3 forward primer
  source 1..23: mol_type = other DNA
ggtatcgatgattgctgtctgta

SEQ ID NO: 2736 - DNA, 30 bp, synthetic construct
  misc_feature 1..30: note = Synthetic: CSMD3 reverse primer
  source 1..30: mol_type = other DNA
ttgtcttttgtaattcaggttatctggaat

SEQ ID NO: 2737 - DNA, 22 bp, synthetic construct
  misc_feature 1..22: note = Synthetic: CSMD3 forward primer
  source 1..22: mol_type = other DNA
tcacagaagcatgagcaggtac

SEQ ID NO: 2738 - DNA, 25 bp, synthetic construct
  misc_feature 1..25: note = Synthetic: CSMD3 reverse primer
  source 1..25: mol_type = other DNA
gtccttgcattttacaggggtatat

SEQ ID NO: 2739 - DNA, 30 bp, synthetic construct
  misc_feature 1..30: note = Synthetic: CSMD3 forward primer
  source 1..30: mol_type = other DNA
tgagctagagcagtagaaataacatgaaaa

SEQ ID NO: 2740 - DNA, 25 bp, synthetic construct
  misc_feature 1..25: note = Synthetic: CSMD3 reverse primer
  source 1..25: mol_type = other DNA
attgctattcttgtgcctttttttg

SEQ ID NO: 2741 - DNA, 29 bp, synthetic construct
  misc_feature 1..29: note = Synthetic: CSMD3 forward primer
  source 1..29: mol_type = other DNA
accattggttattctcttgacaaacaatg

SEQ ID NO: 2742 - DNA, 28 bp, synthetic construct
  misc_feature 1..28: note = Synthetic: CSMD3 reverse primer
  source 1..28: mol_type = other DNA
cttatatggaattagagaaggcgatgga

SEQ ID NO: 2743 - DNA, 27 bp, synthetic construct
  misc_feature 1..27: note = Synthetic: CSMD3 forward primer
  source 1..27: mol_type = other DNA
gcattcaaaccttaaaacatcacgatt

SEQ ID NO: 2744 - DNA, 24 bp, synthetic construct
  misc_feature 1..24: note = Synthetic: CSMD3 reverse primer
  source 1..24: mol_type = other DNA
aaagttgtggtgatcctggtacac

SEQ ID NO: 2745 - DNA, 25 bp, synthetic construct
  misc_feature 1..25: note = Synthetic: CSMD3 forward primer
  source 1..25: mol_type = other DNA
gatcagagattatcgtccagatgca

SEQ ID NO: 2746 - DNA, 23 bp, synthetic construct
  misc_feature 1..23: note = Synthetic: CSMD3 reverse primer
  source 1..23: mol_type = other DNA
cctgtctaactttactgcaccaa

SEQ ID NO: 2747 - DNA, 26 bp, synthetic construct
  misc_feature 1..26: note = Synthetic: CSMD3 forward primer
  source 1..26: mol_type = other DNA
cttctgggtaatcaggagaaagaact

SEQ ID NO: 2748 - DNA, 27 bp, synthetic construct
  misc_feature 1..27: note = Synthetic: CSMD3 reverse primer
  source 1..27: mol_type = other DNA
ttgtatttcataatcttcctgtttcac

SEQ ID NO: 2749 - DNA, 28 bp, synthetic construct
  misc_feature 1..28: note = Synthetic: CSMD3 forward primer
  source 1..28: mol_type = other DNA
aatacaaaaagtagggcaaacagaatga

SEQ ID NO: 2750 - DNA, 25 bp, synthetic construct
  misc_feature 1..25: note = Synthetic: CSMD3 reverse primer
  source 1..25: mol_type = other DNA
ataccttctatttacaacagacaac

SEQ ID NO: 2751 - DNA, 28 bp, synthetic construct
  misc_feature 1..28: note = Synthetic: CSMD3 forward primer
  source 1..28: mol_type = other DNA
tcttgaaaccattattggaacgactgtt

SEQ ID NO: 2752 - DNA, 25 bp, synthetic construct
  misc_feature 1..25: note = Synthetic: CSMD3 reverse primer
  source 1..25: mol_type = other DNA
agtgccccagtttctatttagtagc

SEQ ID NO: 2753 - DNA, 26 bp, synthetic construct
  misc_feature 1..26: note = Synthetic: CSMD3 forward primer
  source 1..26: mol_type = other DNA
gaatgcaggttattctttcctctcct

SEQ ID NO: 2754 - DNA, 17 bp, synthetic construct
  misc_feature 1..17: note = Synthetic: CSMD3 reverse primer
  source 1..17: mol_type = other DNA
gcgtgtcgtgacccagg

SEQ ID NO: 2755 - DNA, 22 bp, synthetic construct
  misc_feature 1..22: note = Synthetic: CSMD3 forward primer
  source 1..22: mol_type = other DNA
ccatttcgagtcccattcatgg

SEQ ID NO: 2756 - DNA, 34 bp, synthetic construct
  misc_feature 1..34: note = Synthetic: CSMD3 reverse primer
  source 1..34: mol_type = other DNA
aaactaaaattttgtctctgtcttttgataggtt

SEQ ID NO: 2757 - DNA, 25 bp, synthetic construct
  misc_feature 1..25: note = Synthetic: CSMD3 forward primer
  source 1..25: mol_type = other DNA
aatagttctgccagcagtatgtttt

SEQ ID NO: 2758 - DNA, 17 bp, synthetic construct
  misc_feature 1..17: note = Synthetic: CSMD3 reverse primer
  source 1..17: mol_type = other DNA
accacctgtgcccaatg

SEQ ID NO: 2759 - DNA, 29 bp, synthetic construct
  misc_feature 1..29: note = Synthetic: CSMD3 forward primer
  source 1..29: mol_type = other DNA
atttcaaattcatcatcttccgtcaaaat

SEQ ID NO: 2760 - DNA, 23 bp, synthetic construct
  misc_feature 1..23: note = Synthetic: CSMD3 reverse primer
  source 1..23: mol_type = other DNA
caactaagggtgtgccaacctcc

SEQ ID NO: 2761 - DNA, 24 bp, synthetic construct
  misc_feature 1..24: note = Synthetic: CSMD3 forward primer
  source 1..24: mol_type = other DNA
ttggcatacagctgtagtgagttc

SEQ ID NO: 2762 - DNA, 24 bp, synthetic construct
  misc_feature 1..24: note = Synthetic: CSMD3 reverse primer
  source 1..24: mol_type = other DNA
ttggtaggaacgcgagttacctat

SEQ ID NO: 2763 - DNA, 30 bp, synthetic construct
  misc_feature 1..30: note = Synthetic: CSMD3 forward primer
  source 1..30: mol_type = other DNA
ttggatgacaatcgatatccatcattacaa

SEQ ID NO: 2764 - DNA, 25 bp, synthetic construct
  misc_feature 1..25: note = Synthetic: CSMD3 reverse primer
  source 1..25: mol_type = other DNA
ggattcctaaagctccaacaaatgg

SEQ ID NO: 2765 - DNA, 27 bp, synthetic construct
  misc_feature 1..27: note = Synthetic: CSMD3 forward primer
  source 1..27: mol_type = other DNA
tatcacaagcataacgtacagtacttt

SEQ ID NO: 2766 - DNA, 21 bp, synthetic construct
  misc_feature 1..21: note = Synthetic: CSMD3 reverse primer
  source 1..21: mol_type = other DNA
cattgcaggtgatgctactgg

SEQ ID NO: 2767 - DNA, 20 bp, synthetic construct
  misc_feature 1..20: note = Synthetic: CSMD3 forward primer
  source 1..20: mol_type = other DNA
agtacctggatcgccacatg

SEQ ID NO: 2768 - DNA, 27 bp, synthetic construct
  misc_feature 1..27: note = Synthetic: CSMD3 reverse primer
  source 1..27: mol_type = other DNA
ccttggactaactggtaaacttaataa

SEQ ID NO: 2769 - DNA, 25 bp, synthetic construct
  misc_feature 1..25: note = Synthetic: CSMD3 forward primer
  source 1..25: mol_type = other DNA
aagtgccatctgcttgacatattct

SEQ ID NO: 2770 - DNA, 22 bp, synthetic construct
  misc_feature 1..22: note = Synthetic: CSMD3 reverse primer
  source 1..22: mol_type = other DNA
tataccagtcagaggtttcatt

SEQ ID NO: 2771 - DNA, 28 bp, synthetic construct
  misc_feature 1..28: note = Synthetic: CSMD3 forward primer
  source 1..28: mol_type = other DNA
actaatatgaaaggaaaattgcagctga

SEQ ID NO: 2772 - DNA, 24 bp, synthetic construct
  misc_feature 1..24: note = Synthetic: CSMD3 reverse primer
  source 1..24: mol_type = other DNA
ttttgtggtgaccctggtatacct

SEQ ID NO: 2773 - DNA, 19 bp, synthetic construct
  misc_feature 1..19: note = Synthetic: CSMD1 forward primer
  source 1..19: mol_type = other DNA
acaccacccagctagttag

SEQ ID NO: 2774 - DNA, 21 bp, synthetic construct
  misc_feature 1..21: note = Synthetic: CSMD1 reverse primer
  source 1..21: mol_type = other DNA
ctgtgagaggaaccaccagtg

SEQ ID NO: 2775 - DNA, 17 bp, synthetic construct
  misc_feature 1..17: note = Synthetic: CSMD1 forward primer
  source 1..17: mol_type = other DNA
tgggcaaggcgtggttc

SEQ ID NO: 2776 - DNA, 17 bp, synthetic construct
  misc_feature 1..17: note = Synthetic: CSMD1 reverse primer
  source 1..17: mol_type = other DNA
gctgtgacccggggtac

SEQ ID NO: 2777 - DNA, 24 bp, synthetic construct
  misc_feature 1..24: note = Synthetic: CSMD1 forward primer
  source 1..24: mol_type = other DNA
caaagtccgggttcacttttactc

SEQ ID NO: 2778 - DNA, 22 bp, synthetic construct
  misc_feature 1..22: note = Synthetic: CSMD1 reverse primer
  source 1..22: mol_type = other DNA
ccagcaggtgttattttgtcac

SEQ ID NO: 2779 - DNA, 21 bp, synthetic construct
  misc_feature 1..21: note = Synthetic: CSMD1 forward primer
  source 1..21: mol_type = other DNA
gatacggctgtgggtagttgg

SEQ ID NO: 2780 - DNA, 20 bp, synthetic construct
  misc_feature 1..20: note = Synthetic: CSMD1 reverse primer
  source 1..20: mol_type = other DNA
tgcttgtggagggaatctga

SEQ ID NO: 2781 - DNA, 20 bp, synthetic construct
  misc_feature 1..20: note = Synthetic: CRX forward primer
  source 1..20: mol_type = other DNA
ctgagggtcctgtttcccat

SEQ ID NO: 2782 - DNA, 19 bp, synthetic construct
  misc_feature 1..19: note = Synthetic: CRX reverse primer
  source 1..19: mol_type = other DNA
tcttggcaaacagtgcctc

SEQ ID NO: 2783 - DNA, 29 bp, synthetic construct
  misc_feature 1..29: note = Synthetic: CREBBP forward primer
  source 1..29: mol_type = other DNA
aaactcaccctaatttcttcacatactct

SEQ ID NO: 2784 - DNA, 22 bp, synthetic construct
  misc_feature 1..22: note = Synthetic: CREBBP reverse primer
  source 1..22: mol_type = other DNA
gtgtacatttcttatctggata

SEQ ID NO: 2785 - DNA, 20 bp, synthetic construct
  misc_feature 1..20: note = Synthetic: CREBBP forward primer
  source 1..20: mol_type = other DNA
gtggccggaagaaatgaata

SEQ ID NO: 2786 - DNA, 26 bp, synthetic construct
  misc_feature 1..26: note = Synthetic: CREBBP reverse primer
  source 1..26: mol_type = other DNA
gttgtttgttgcttgtgtttgatttc

SEQ ID NO: 2787 - DNA, 21 bp, synthetic construct
  misc_feature 1..21: note = Synthetic: CREBBP forward primer
  source 1..21: mol_type = other DNA
gccttgtccagcatctttttg

SEQ ID NO: 2788 - DNA, 21 bp, synthetic construct
  misc_feature 1..21: note = Synthetic: CREBBP reverse primer
  source 1..21: mol_type = other DNA
ccacccacctgatcaaaaaat

SEQ ID NO: 2789 - DNA, 22 bp, synthetic construct
  misc_feature 1..22: note = Synthetic: CREBBP forward primer
  source 1..22: mol_type = other DNA
cactcctgcagtcgttttggct

SEQ ID NO: 2790 - DNA, 17 bp, synthetic construct
  misc_feature 1..17: note = Synthetic: CREBBP reverse primer
  source 1..17: mol_type = other DNA
gggtcctgcaggtatgt

SEQ ID NO: 2791 - DNA, 24 bp, synthetic construct
  misc_feature 1..24: note = Synthetic: CREBBP forward primer
  source 1..24: mol_type = other DNA
ggtggcaatggaagatgtaatcat

SEQ ID NO: 2792 - DNA, 20 bp, synthetic construct
  misc_feature 1..20: note = Synthetic: CREBBP reverse primer
  source 1..20: mol_type = other DNA
gcacgttcatctgacgtgtg

SEQ ID NO: 2793 - DNA, 21 bp, synthetic construct
  misc_feature 1..21: note = Synthetic: CREBBP forward primer
  source 1..21: mol_type = other DNA
tgacaaaagccaccaccttcc

SEQ ID NO: 2794 - DNA, 20 bp, synthetic construct
  misc_feature 1..20: note = Synthetic: CREBBP reverse primer
  source 1..20: mol_type = other DNA
tttgcagagcggatcatcca

SEQ ID NO: 2795 - DNA, 23 bp, synthetic construct
  misc_feature 1..23: note = Synthetic: CPNE4 forward primer
  source 1..23: mol_type = other DNA
gaccatgtacctgtttcccttcc

SEQ ID NO: 2796 - DNA, 21 bp, synthetic construct
  misc_feature 1..21: note = Synthetic: CPNE4 reverse primer
  source 1..21: mol_type = other DNA
ctccaatggcaagcatgactt

SEQ ID NO: 2797 - DNA, 28 bp, synthetic construct
  misc_feature 1..28: note = Synthetic: COL6A3 forward primer
  source 1..28: mol_type = other DNA
aacaaagaggtttcttgccacaaattcg

SEQ ID NO: 2798 - DNA, 27 bp, synthetic construct
  misc_feature 1..27: note = Synthetic: COL6A3 reverse primer
  source 1..27: mol_type = other DNA
atgatgtcttcccagaattctatctga

SEQ ID NO: 2799 - DNA, 21 bp, synthetic construct
  misc_feature 1..21: note = Synthetic: COL6A3 forward primer
  source 1..21: mol_type = other DNA
cctgggatctgtaggttttca

SEQ ID NO: 2800 - DNA, 21 bp, synthetic construct
  misc_feature 1..21: note = Synthetic: COL6A3 reverse primer
  source 1..21: mol_type = other DNA
acatcggccccagtaaagtga

SEQ ID NO: 2801 - DNA, 24 bp, synthetic construct
  misc_feature 1..24: note = Synthetic: COL5A3 forward primer
  source 1..24: mol_type = other DNA
acaaaagattccctgcatactcac

SEQ ID NO: 2802 - DNA, 23 bp, synthetic construct
  misc_feature 1..23: note = Synthetic: COL5A3 reverse primer
  source 1..23: mol_type = other DNA
acccgatgtccttttcctagggt

SEQ ID NO: 2803 - DNA, 19 bp, synthetic construct
  misc_feature 1..19: note = Synthetic: COL5A1 forward primer
  source 1..19: mol_type = other DNA
cctttcagggcccagtggg

SEQ ID NO: 2804 - DNA, 21 bp, synthetic construct
  misc_feature 1..21: note = Synthetic: COL5A1 reverse primer
  source 1..21: mol_type = other DNA
ttgccctcttgagcacctacc

SEQ ID NO: 2805 - DNA, 28 bp, synthetic construct
  misc_feature 1..28: note = Synthetic: COL25A1 forward primer
  source 1..28: mol_type = other DNA
agagaatggttattttccagtttaagaa

SEQ ID NO: 2806 - DNA, 22 bp, synthetic construct
  misc_feature 1..22: note = Synthetic: COL25A1 reverse primer
  source 1..22: mol_type = other DNA
tttgtgacagggtgaacggggg

SEQ ID NO: 2807 - DNA, 19 bp, synthetic construct
  misc_feature 1..19: note = Synthetic: COL25A1 forward primer
  source 1..19: mol_type = other DNA
cccctcgctcacctcttcc

SEQ ID NO: 2808 - DNA, 25 bp, synthetic construct
  misc_feature 1..25: note = Synthetic: COL25A1 reverse primer
  source 1..25: mol_type = other DNA
ggaatgaccatttacctgttttgca

SEQ ID NO: 2809 - DNA, 30 bp, synthetic construct
  misc_feature 1..30: note = Synthetic: COL24A1 forward primer
  source 1..30: mol_type = other DNA
tattgagaatcaggagctctagataaccat

SEQ ID NO: 2810 - DNA, 32 bp, synthetic construct
  misc_feature 1..32: note = Synthetic: COL24A1 reverse primer
  source 1..32: mol_type = other DNA
ataaacgctacatttttatattccctagggtt

SEQ ID NO: 2811 - DNA, 24 bp, synthetic construct
  misc_feature 1..24: note = Synthetic: COL24A1 forward primer
  source 1..24: mol_type = other DNA
ggaatcccaatatctcctggaaaa

SEQ ID NO: 2812 - DNA, 27 bp, synthetic construct
  misc_feature 1..27: note = Synthetic: COL24A1 reverse primer
  source 1..27: mol_type = other DNA
tttaactggatatggaggaatagcaaa

SEQ ID NO: 2813 - DNA, 27 bp, synthetic construct
  misc_feature 1..27: note = Synthetic: COL22A1 forward primer
  source 1..27: mol_type = other DNA
cctgtagaaaatcaaagccagtcttac

SEQ ID NO: 2814 - DNA, 24 bp, synthetic construct
  misc_feature 1..24: note = Synthetic: COL22A1 reverse primer
  source 1..24: mol_type = other DNA
accaaatgctctttctctacaggg

SEQ ID NO: 2815 - DNA, 17 bp, synthetic construct
  misc_feature 1..17: note = Synthetic: COL22A1 forward primer
  source 1..17: mol_type = other DNA
caccagggggtcctgga

SEQ ID NO: 2816 - DNA, 20 bp, synthetic construct
  misc_feature 1..20: note = Synthetic: COL22A1 reverse primer
  source 1..20: mol_type = other DNA
ctcatcaggacccatctgta

SEQ ID NO: 2817 - DNA, 26 bp, synthetic construct
  misc_feature 1..26: note = Synthetic: COL19A1 forward primer
  source 1..26: mol_type = other DNA
ttctttgttttcctcccacagtaaga

SEQ ID NO: 2818 - DNA, 23 bp, synthetic construct
  misc_feature 1..23: note = Synthetic: COL19A1 reverse primer
  source 1..23: mol_type = other DNA
acagaaaccaccgttcctttttg

SEQ ID NO: 2819 - DNA, 22 bp, synthetic construct
  misc_feature 1..22: note = Synthetic: COL19A1 forward primer
  source 1..22: mol_type = other DNA
tagctgccatgtttcgagtacg

SEQ ID NO: 2820 - DNA, 27 bp, synthetic construct
  misc_feature 1..27: note = Synthetic: COL19A1 reverse primer
  source 1..27: mol_type = other DNA
cacaactctaatggtactttacctgtg

SEQ ID NO: 2821 - DNA, 31 bp, synthetic construct
  misc_feature 1..31: note = Synthetic: COL11A1 forward primer
  source 1..31: mol_type = other DNA
cttaatcatcacttcttaagttctgagaaaa

SEQ ID NO: 2822 - DNA, 21 bp, synthetic construct
  misc_feature 1..21: note = Synthetic: COL11A1 reverse primer
  source 1..21: mol_type = other DNA
gcaggattacgtggtttccca

SEQ ID NO: 2823 - DNA, 22 bp, synthetic construct
  misc_feature 1..22: note = Synthetic: COL11A1 forward primer
  source 1..22: mol_type = other DNA
ctccaggaagacctctttcccc

SEQ ID NO: 2824 - DNA, 23 bp, synthetic construct
  misc_feature 1..23: note = Synthetic: COL11A1 reverse primer
  source 1..23: mol_type = other DNA
ccaggtcctcaaggtatctcagg

SEQ ID NO: 2825 - DNA, 27 bp, synthetic construct
  misc_feature 1..27: note = Synthetic: COL11A1 forward primer
  source 1..27: mol_type = other DNA
ctggactataatgctcacagtagtcat

SEQ ID NO: 2826 - DNA, 27 bp, synthetic construct
  misc_feature 1..27: note = Synthetic: COL11A1 reverse primer
  source 1..27: mol_type = other DNA
taactgaatctgtgtctgtttgttttt

SEQ ID NO: 2827 - DNA, 23 bp, synthetic construct
  misc_feature 1..23: note = Synthetic: CNTNAP5 forward primer
  source 1..23: mol_type = other DNA
tcacctttgccatcgatgttggg

SEQ ID NO: 2828 - DNA, 19 bp, synthetic construct
  misc_feature 1..19: note = Synthetic: CNTNAP5 reverse primer
  source 1..19: mol_type = other DNA
ggaggtctccttgaggttc

SEQ ID NO: 2829 - DNA, 18 bp, synthetic construct
  misc_feature 1..18: note = Synthetic: CNTNAP5 forward primer
  source 1..18: mol_type = other DNA
ctatgtccgggctgagag

SEQ ID NO: 2830 - DNA, 18 bp, synthetic construct
  misc_feature 1..18: note = Synthetic: CNTNAP5 reverse primer
  source 1..18: mol_type = other DNA
cctggtgctccttggaag

SEQ ID NO: 2831 - DNA, 19 bp, synthetic construct
  misc_feature 1..19: note = Synthetic: CNTNAP5 forward primer
  source 1..19: mol_type = other DNA
tccctgcaggtggacaacc

SEQ ID NO: 2832 - DNA, 23 bp, synthetic construct
  misc_feature 1..23: note = Synthetic: CNTNAP5 reverse primer
  source 1..23: mol_type = other DNA
tcccctacctacaaacaactggc

SEQ ID NO: 2833 - DNA, 19 bp, synthetic construct
  misc_feature 1..19: note = Synthetic: CNTNAP5 forward primer
  source 1..19: mol_type = other DNA
gccattttcgactgcagct

SEQ ID NO: 2834 - DNA, 23 bp, synthetic construct
  misc_feature 1..23: note = Synthetic: CNTNAP5 reverse primer
  source 1..23: mol_type = other DNA
gtgatcttgcagggtttagcaca

SEQ ID NO: 2835 - DNA, 22 bp, synthetic construct
  misc_feature 1..22: note = Synthetic: CNTNAP5 forward primer
  source 1..22: mol_type = other DNA
tctgctgatgtgcctttgtttt

SEQ ID NO: 2836 - DNA, 26 bp, synthetic construct
  misc_feature 1..26: note = Synthetic: CNTNAP5 reverse primer
  source 1..26: mol_type = other DNA
cttataaccctgaactctacttccgg

SEQ ID NO: 2837 - DNA, 27 bp, synthetic construct
  misc_feature 1..27: note = Synthetic: CNTNAP5 forward primer
  source 1..27: mol_type = other DNA
gcaacttcgactcagttataacttctc

SEQ ID NO: 2838 - DNA, 27 bp, synthetic construct
  misc_feature 1..27: note = Synthetic: CNTNAP5 reverse primer
  source 1..27: mol_type = other DNA
actggaaaggtatgaactagaacaaca

SEQ ID NO: 2839 - DNA, 25 bp, synthetic construct
  misc_feature 1..25: note = Synthetic: CNTNAP4 forward primer
  source 1..25: mol_type = other DNA
agcacctttcattgtaactgtacca

SEQ ID NO: 2840 - DNA, 22 bp, synthetic construct
  misc_feature 1..22: note = Synthetic: CNTNAP4 reverse primer
  source 1..22: mol_type = other DNA
gcaagaaaaagcagatgtgttc

SEQ ID NO: 2841 - DNA, 23 bp, synthetic construct
  misc_feature 1..23: note = Synthetic: CNTNAP2 forward primer
  source 1..23: mol_type = other DNA
catcagacagcgaccattatcaa

SEQ ID NO: 2842 - DNA, 21 bp, synthetic construct
  misc_feature 1..21: note = Synthetic: CNTNAP2 reverse primer
  source 1..21: mol_type = other DNA
tgctataccttccttgggttg

SEQ ID NO: 2843 - DNA, 21 bp, synthetic construct
  misc_feature 1..21: note = Synthetic: CNTNAP2 forward primer
  source 1..21: mol_type = other DNA
agcagatcagtgccattgcaa

SEQ ID NO: 2844 - DNA, 21 bp, synthetic construct
  misc_feature 1..21: note = Synthetic: CNTNAP2 reverse primer
  source 1..21: mol_type = other DNA
tctccctgtgtcgctgtagag

SEQ ID NO: 2845 - DNA, 28 bp, synthetic construct
  misc_feature 1..28: note = Synthetic: CNTN5 forward primer
  source 1..28: mol_type = other DNA
ttatccattgcctttgacctataggacc

SEQ ID NO: 2846 - DNA, 18 bp, synthetic construct
  misc_feature 1..18: note = Synthetic: CNTN5 reverse primer
  source 1..18: mol_type = other DNA
ggctccaggacagtgtgg

SEQ ID NO: 2847 - DNA, 28 bp, synthetic construct
  misc_feature 1..28: note = Synthetic: CNTN5 forward primer
  source 1..28: mol_type = other DNA
attgttgaggaaataaccgaaagtacgg

SEQ ID NO: 2848 - DNA, 19 bp, synthetic construct
  misc_feature 1..19: note = Synthetic: CNTN5 reverse primer
  source 1..19: mol_type = other DNA
gctgcgagcttgaaggttg

SEQ ID NO: 2849 - DNA, 31 bp, synthetic construct
  misc_feature 1..31: note = Synthetic: CNTN5 forward primer
  source 1..31: mol_type = other DNA
attatatttttcttctttagccagtatctga

SEQ ID NO: 2850 - DNA, 19 bp, synthetic construct
  misc_feature 1..19: note = Synthetic: CNTN5 reverse primer
  source 1..19: mol_type = other DNA
cttccagccacgtgttcca

SEQ ID NO: 2851 - DNA, 20 bp, synthetic construct
  misc_feature 1..20: note = Synthetic: CNTN5 forward primer
  source 1..20: mol_type = other DNA
ggaaggcttcggctatattg

SEQ ID NO: 2852 - DNA, 24 bp, synthetic construct
  misc_feature 1..24: note = Synthetic: CNTN5 reverse primer
  source 1..24: mol_type = other DNA
ttcagaggatgtcaccattttttc

SEQ ID NO: 2853 - DNA, 17 bp, synthetic construct
  misc_feature 1..17: note = Synthetic: CNTLN forward primer
  source 1..17: mol_type = other DNA
gaggcctcgggttttgc

SEQ ID NO: 2854 - DNA, 17 bp, synthetic construct
  misc_feature 1..17: note = Synthetic: CNTLN reverse primer
  source 1..17: mol_type = other DNA
catgagccggagctgcc

SEQ ID NO: 2855 - DNA, 22 bp, synthetic construct
  misc_feature 1..22: note = Synthetic: CNGA3 forward primer
  source 1..22: mol_type = other DNA
cgacctggcttacttaaaggtg

SEQ ID NO: 2856 - DNA, 21 bp, synthetic construct
  misc_feature 1..21: note = Synthetic: CNGA3 reverse primer
  source 1..21: mol_type = other DNA
ttggtccttgtctctgtgcgg

SEQ ID NO: 2857 - DNA, 22 bp, synthetic construct
  misc_feature 1..22: note = Synthetic: CNGA3 forward primer
  source 1..22: mol_type = other DNA
actgaagttttcccggctcttt

SEQ ID NO: 2858 - DNA, 28 bp, synthetic construct
  misc_feature 1..28: note = Synthetic: CNGA3 reverse primer
  source 1..28: mol_type = other DNA
tgatgagaatgtacaagaccaagttccc

SEQ ID NO: 2859 - DNA, 21 bp, synthetic construct
  misc_feature 1..21: note = Synthetic: CNGA1 forward primer
  source 1..21: mol_type = other DNA
tcgtccgatatcccctttctt

SEQ ID NO: 2860 - DNA, 23 bp, synthetic construct
  misc_feature 1..23: note = Synthetic: CNGA1 reverse primer
  source 1..23: mol_type = other DNA
aaaggtacgcatttttgctgatt

SEQ ID NO: 2861 - DNA, 20 bp, synthetic construct
  misc_feature 1..20: note = Synthetic: CNGA1 forward primer
  source 1..20: mol_type = other DNA
caccaacagaccagcttcac

SEQ ID NO: 2862 - DNA, 24 bp, synthetic construct
  misc_feature 1..24: note = Synthetic: CNGA1 reverse primer
  source 1..24: mol_type = other DNA
agaaattgccatcaacgttcactt

SEQ ID NO: 2863 - DNA, 22 bp, synthetic construct
  misc_feature 1..22: note = Synthetic: CLLU1OS forward primer
  source 1..22: mol_type = other DNA
tcactgtggggttctaattaac

SEQ ID NO: 2864 - DNA, 25 bp, synthetic construct
  misc_feature 1..25: note = Synthetic: CLLU1OS reverse primer
  source 1..25: mol_type = other DNA
taccccttctacagatgaacaaatt

SEQ ID NO: 2865 - DNA, 18 bp, synthetic construct
  misc_feature 1..18: note = Synthetic: CILP2 forward primer
  source 1..18: mol_type = other DNA
ttcctggtgggcaacgtg

SEQ ID NO: 2866 - DNA, 18 bp, synthetic construct
  misc_feature 1..18: note = Synthetic: CILP2 reverse primer
  source 1..18: mol_type = other DNA
gcaccttcacgaagcagc

SEQ ID NO: 2867 - DNA, 21 bp, synthetic construct
  misc_feature 1..21: note = Synthetic: CILP2 forward primer
  source 1..21: mol_type = other DNA
ttcaatctggacgtgcctgag

SEQ ID NO: 2868 - DNA, 20 bp, synthetic construct
  misc_feature 1..20: note = Synthetic: CILP2 reverse primer
  source 1..20: mol_type = other DNA
tgggggtgaacttgtcgttg

SEQ ID NO: 2869 - DNA, 21 bp, synthetic construct
  misc_feature 1..21: note = Synthetic: CHST8 forward primer
  source 1..21: mol_type = other DNA
aagttcgagagcatggaggac

SEQ ID NO: 2870 - DNA, 18 bp, synthetic construct
  misc_feature 1..18: note = Synthetic: CHST8 reverse primer
  source 1..18: mol_type = other DNA
gtgccggtccttgaaccg

SEQ ID NO: 2871 - DNA, 17 bp, synthetic construct
  misc_feature 1..17: note = Synthetic: CHST8 forward primer
  source 1..17: mol_type = other DNA
cggaacctgaccttccc

SEQ ID NO: 2872 - DNA, 17 bp, synthetic construct
  misc_feature 1..17: note = Synthetic: CHST8 reverse primer
  source 1..17: mol_type = other DNA
gcgctgcctttgcaggg

SEQ ID NO: 2873 - DNA, 26 bp, synthetic construct
  misc_feature 1..26: note = Synthetic: CHRM3 forward primer
  source 1..26: mol_type = other DNA
tatgctctgtgcaacaaaacattcag

SEQ ID NO: 2874 - DNA, 21 bp, synthetic construct
  misc_feature 1..21: note = Synthetic: CHRM3 reverse primer
  source 1..21: mol_type = other DNA
gactgtctctgctggtactgc

SEQ ID NO: 2875 - DNA, 24 bp, synthetic construct
  misc_feature 1..24: note = Synthetic: CHRM2 forward primer
  source 1..24: mol_type = other DNA
ccattatcgggaacatcctagtca

SEQ ID NO: 2876 - DNA, 19 bp, synthetic construct
  misc_feature 1..19: note = Synthetic: CHRM2 reverse primer
  source 1..19: mol_type = other DNA
cacaggccaagctgaataa

SEQ ID NO: 2877 - DNA, 23 bp, synthetic construct
  misc_feature 1..23: note = Synthetic: CHRM2 forward primer
  source 1..23: mol_type = other DNA
cctccagaccgtcaacaattact

SEQ ID NO: 2878 - DNA, 24 bp, synthetic construct
  misc_feature 1..24: note = Synthetic: CHRM2 reverse primer
  source 1..24: mol_type = other DNA
cagtgtagagggtgtacaagttca

SEQ ID NO: 2879 - DNA, 25 bp, synthetic construct
  misc_feature 1..25: note = Synthetic: CHRM2 forward primer
  source 1..25: mol_type = other DNA
catcagctttgacaggtacttctgt

SEQ ID NO: 2880 - DNA, 20 bp, synthetic construct
  misc_feature 1..20: note = Synthetic: CHRM2 reverse primer
  source 1..20: mol_type = other DNA
ggcagctgcaatcatcatac

SEQ ID NO: 2881 - DNA, 20 bp, synthetic construct
  misc_feature 1..20: note = Synthetic: CHRM2 forward primer
  source 1..20: mol_type = other DNA
gcggaccacaaaaatggcag

SEQ ID NO: 2882 - DNA, 22 bp, synthetic construct
  misc_feature 1..22: note = Synthetic: CHRM2 reverse primer
  source 1..22: mol_type = other DNA
ccctacaatgaactgccagaag

SEQ ID NO: 2883 - DNA, 21 bp, synthetic construct
  misc_feature 1..21: note = Synthetic: CHRM2 forward primer
  source 1..21: mol_type = other DNA
agccagcaagagcaggataaa

SEQ ID NO: 2884 - DNA, 25 bp, synthetic construct
  misc_feature 1..25: note = Synthetic: CHRM2 reverse primer
  source 1..25: mol_type = other DNA
ggcatgttgttattgtttggcttca

SEQ ID NO: 2885 - DNA, 21 bp, synthetic construct
  misc_feature 1..21: note = Synthetic: CHRM2 forward primer
  source 1..21: mol_type = other DNA
accccgtttctccaagtctgg

SEQ ID NO: 2886 - DNA, 25 bp, synthetic construct
  misc_feature 1..25: note = Synthetic: CHRM2 reverse primer
  source 1..25: mol_type = other DNA
tgccattctggattttgttgtgctc

SEQ ID NO: 2887 - DNA, 19 bp, synthetic construct
  misc_feature 1..19: note = Synthetic: CDX2 forward primer
  source 1..19: mol_type = other DNA
ctcagcctggaattgctct

SEQ ID NO: 2888 - DNA, 19 bp, synthetic construct
  misc_feature 1..19: note = Synthetic: CDX2 reverse primer
  source 1..19: mol_type = other DNA
cctgcaagcctcagtgcct

SEQ ID NO: 2889 - DNA, 23 bp, synthetic construct
  misc_feature 1..23: note = Synthetic: CDKN2A forward primer
  source 1..23: mol_type = other DNA
gattccaattcccctgcaaactt

SEQ ID NO: 2890 - DNA, 17 bp, synthetic construct
  misc_feature 1..17: note = Synthetic: CDKN2A reverse primer
  source 1..17: mol_type = other DNA
cccaacgcaccgaatag

SEQ ID NO: 2891 - DNA, 17 bp, synthetic construct
  misc_feature 1..17: note = Synthetic: CDKN2A forward primer
  source 1..17: mol_type = other DNA
ggcctccgaccgtaact

SEQ ID NO: 2892 - DNA, 17 bp, synthetic construct
  misc_feature 1..17: note = Synthetic: CDKN2A reverse primer
  source 1..17: mol_type = other DNA
ggggagcagcatggagc

SEQ ID NO: 2893 - DNA, 17 bp, synthetic construct
  misc_feature 1..17: note = Synthetic: CDKN2A forward primer
  source 1..17: mol_type = other DNA
ccgcacctcctctaccc

SEQ ID NO: 2894 - DNA, 17 bp, synthetic construct
  misc_feature 1..17: note = Synthetic: CDKN2A reverse primer
  source 1..17: mol_type = other DNA
gcggagagggggagagc

SEQ ID NO: 2895 - DNA, 21 bp, synthetic construct
  misc_feature 1..21: note = Synthetic: CDKN2A forward primer
  source 1..21: mol_type = other DNA
catctatgcgggcatggttac

SEQ ID NO: 2896 - DNA, 17 bp, synthetic construct
  misc_feature 1..17: note = Synthetic: CDKN2A reverse primer
  source 1..17: mol_type = other DNA
atgcctggggccgtctg

SEQ ID NO: 2897 - DNA, 17 bp, synthetic construct
  misc_feature 1..17: note = Synthetic: CDKN2A forward primer
  source 1..17: mol_type = other DNA
gcgatggcccagctcct

SEQ ID NO: 2898 - DNA, 17 bp, synthetic construct
  misc_feature 1..17: note = Synthetic: CDKN2A reverse primer
  source 1..17: mol_type = other DNA
ccgtgcacgacgctgcc

SEQ ID NO: 2899 - DNA, 18 bp, synthetic construct
  misc_feature 1..18: note = Synthetic: CDKN2A forward primer
  source 1..18: mol_type = other DNA
agcgtgtccaggaagccc

SEQ ID NO: 2900 - DNA, 18 bp, synthetic construct
  misc_feature 1..18: note = Synthetic: CDKN2A reverse primer
  source 1..18: mol_type = other DNA
ctctggcaggtcatgatg

SEQ ID NO: 2901 - DNA, 17 bp, synthetic construct
  misc_feature 1..17: note = Synthetic: CDKN2A forward primer
  source 1..17: mol_type = other DNA
gtcggcgcagttgggct

SEQ ID NO: 2902 - DNA, 22 bp, synthetic construct
  misc_feature 1..22: note = Synthetic: CDKN2A reverse primer
  source 1..22: mol_type = other DNA
aagcttcctttccgtcatgccg

SEQ ID NO: 2903 - DNA, 27 bp, synthetic construct
  misc_feature 1..27: note = Synthetic: CDK12 forward primer
  source 1..27: mol_type = other DNA
agaagccactgtaagtttatgtcatgg

SEQ ID NO: 2904 - DNA, 23 bp, synthetic construct
  misc_feature 1..23: note = Synthetic: CDK12 reverse primer
  source 1..23: mol_type = other DNA
gttcctctcctagcagtagttct

SEQ ID NO: 2905 - DNA, 19 bp, synthetic construct
  misc_feature 1..19: note = Synthetic: CDHR5 forward primer
  source 1..19: mol_type = other DNA
cggtgccacgatacagtct

SEQ ID NO: 2906 - DNA, 17 bp, synthetic construct
  misc_feature 1..17: note = Synthetic: CDHR5 reverse primer
  source 1..17: mol_type = other DNA
aacaggccgaccttgcc

SEQ ID NO: 2907 - DNA, 26 bp, synthetic construct
  misc_feature 1..26: note = Synthetic: CDH9 forward primer
  source 1..26: mol_type = other DNA
tatgctgtaacctgtccaatgatact

SEQ ID NO: 2908 - DNA, 25 bp, synthetic construct
  misc_feature 1..25: note = Synthetic: CDH9 reverse primer
  source 1..25: mol_type = other DNA
atagatgagcctcctgtgttcacta

SEQ ID NO: 2909 - DNA, 32 bp, synthetic construct
  misc_feature 1..32: note = Synthetic: CDH9 forward primer
  source 1..32: mol_type = other DNA
ctttacatcttcatctacttctatcaagtaag

SEQ ID NO: 2910 - DNA, 29 bp, synthetic construct
  misc_feature 1..29: note = Synthetic: CDH9 reverse primer
  source 1..29: mol_type = other DNA
aagatacagctgtggtcaaaatatctgtg

SEQ ID NO: 2911 - DNA, 30 bp, synthetic construct
  misc_feature 1..30: note = Synthetic: CDH9 forward primer
  source 1..30: mol_type = other DNA
tcctccttatctgaaaaatagtttcaggca

SEQ ID NO: 2912 - DNA, 26 bp, synthetic construct
  misc_feature 1..26: note = Synthetic: CDH9 reverse primer
  source 1..26: mol_type = other DNA
gaagatacccaagcttttgacattgg

SEQ ID NO: 2913 - DNA, 23 bp, synthetic construct
  misc_feature 1..23: note = Synthetic: CDH9 forward primer
  source 1..23: mol_type = other DNA
ttctcttgcctctggattcctta

SEQ ID NO: 2914 - DNA, 23 bp, synthetic construct
  misc_feature 1..23: note = Synthetic: CDH9 reverse primer
  source 1..23: mol_type = other DNA
acaacattgtgacctacaacgat

SEQ ID NO: 2915 - DNA, 21 bp, synthetic construct
  misc_feature 1..21: note = Synthetic: CDH9 forward primer
  source 1..21: mol_type = other DNA
gttgccagcgaatcatatgga

SEQ ID NO: 2916 - DNA, 22 bp, synthetic construct
  misc_feature 1..22: note = Synthetic: CDH9 reverse primer
  source 1..22: mol_type = other DNA
actgtgcctctgtgggaaaata

SEQ ID NO: 2917 - DNA, 28 bp, synthetic construct
  misc_feature 1..28: note = Synthetic: CDH9 forward primer
  source 1..28: mol_type = other DNA
gccactcaatctaataacatagacagta

SEQ ID NO: 2918 - DNA, 20 bp, synthetic construct
  misc_feature 1..20: note = Synthetic: CDH9 reverse primer
  source 1..20: mol_type = other DNA
gggggcctcgtttcaaaaaa

SEQ ID NO: 2919 - DNA, 23 bp, synthetic construct
  misc_feature 1..23: note = Synthetic: CDH9 forward primer
  source 1..23: mol_type = other DNA
cactatcatcacccccatacata

SEQ ID NO: 2920 - DNA, 22 bp, synthetic construct
  misc_feature 1..22: note = Synthetic: CDH9 reverse primer
  source 1..22: mol_type = other DNA
ctcacagctgattgtaaccaag

SEQ ID NO: 2921 - DNA, 34 bp, synthetic construct
  misc_feature 1..34: note = Synthetic: CDH9 forward primer
  source 1..34: mol_type = other DNA
gctcattgtcattgatatcatgtattttaatgat

SEQ ID NO: 2922 - DNA, 25 bp, synthetic construct
  misc_feature 1..25: note = Synthetic: CDH9 reverse primer
  source 1..25: mol_type = other DNA
gagacattcatgctgcaaagaaact

SEQ ID NO: 2923 - DNA, 25 bp, synthetic construct
  misc_feature 1..25: note = Synthetic: CDH9 forward primer
  source 1..25: mol_type = other DNA
ttggcacgaagaatgtacagagatt

SEQ ID NO: 2924 - DNA, 25 bp, synthetic construct
  misc_feature 1..25: note = Synthetic: CDH9 reverse primer
  source 1..25: mol_type = other DNA
gggctggcagtctatttgttataga

SEQ ID NO: 2925 - DNA, 23 bp, synthetic construct
  misc_feature 1..23: note = Synthetic: CDH9 forward primer
  source 1..23: mol_type = other DNA
gacatctgtcagcgtgatgttca

SEQ ID NO: 2926 - DNA, 24 bp, synthetic construct
  misc_feature 1..24: note = Synthetic: CDH9 reverse primer
  source 1..24: mol_type = other DNA
taccaggttgttatacaggccaaa

SEQ ID NO: 2927 - DNA, 21 bp, synthetic construct
  misc_feature 1..21: note = Synthetic: CDH9 forward primer
  source 1..21: mol_type = other DNA
ttccagaaaggcctcccatct

SEQ ID NO: 2928 - DNA, 29 bp, synthetic construct
  misc_feature 1..29: note = Synthetic: CDH9 reverse primer
  source 1..29: mol_type = other DNA
caaaaggcataataaaaactgcattacca

SEQ ID NO: 2929 - DNA, 22 bp, synthetic construct
  misc_feature 1..22: note = Synthetic: CDH9 forward primer
  source 1..22: mol_type = other DNA
tctattttctctgctcatgtct

SEQ ID NO: 2930 - DNA, 29 bp, synthetic construct
  misc_feature 1..29: note = Synthetic: CDH9 reverse primer
  source 1..29: mol_type = other DNA
cagcgatttaattgcaaaacttttgtctg

SEQ ID NO: 2931 - DNA, 32 bp, synthetic construct
  misc_feature 1..32: note = Synthetic: CDH8 forward primer
  source 1..32: mol_type = other DNA
acatattcagcattaacaacatggagatattt

SEQ ID NO: 2932 - DNA, 20 bp, synthetic construct
  misc_feature 1..20: note = Synthetic: CDH8 reverse primer
  source 1..20: mol_type = other DNA
aatgacaacgcccctgaatt

SEQ ID NO: 2933 - DNA, 23 bp, synthetic construct
  misc_feature 1..23: note = Synthetic: CDH8 forward primer
  source 1..23: mol_type = other DNA
aatgcctcatattcggatgcgaa

SEQ ID NO: 2934 - DNA, 25 bp, synthetic construct
  misc_feature 1..25: note = Synthetic: CDH8 reverse primer
  source 1..25: mol_type = other DNA
cacagtcagatatcacgagtacctg

SEQ ID NO: 2935 - DNA, 26 bp, synthetic construct
  misc_feature 1..26: note = Synthetic: CDH8 forward primer
  source 1..26: mol_type = other DNA
tcatcatcgtagcgaatgatgttttc

SEQ ID NO: 2936 - DNA, 23 bp, synthetic construct
  misc_feature 1..23: note = Synthetic: CDH8 reverse primer
  source 1..23: mol_type = other DNA
cgtggtgctgtttgtaactctac

SEQ ID NO: 2937 - DNA, 28 bp, synthetic construct
  misc_feature 1..28: note = Synthetic: CDH7 forward primer
  source 1..28: mol_type = other DNA
ttgacgaagaaagagacatcagagaaaa

SEQ ID NO: 2938 - DNA, 21 bp, synthetic construct
  misc_feature 1..21: note = Synthetic: CDH7 reverse primer
  source 1..21: mol_type = other DNA
gtttctcagtgcagccatgtc

SEQ ID NO: 2939 - DNA, 19 bp, synthetic construct
  misc_feature 1..19: note = Synthetic: CDH7 forward primer
  source 1..19: mol_type = other DNA
gaggacacggaagcgtttg

SEQ ID NO: 2940 - DNA, 21 bp, synthetic construct
  misc_feature 1..21: note = Synthetic: CDH7 reverse primer
  source 1..21: mol_type = other DNA
ctggtcgactcaggaattgaa

SEQ ID NO: 2941 - DNA, 28 bp, synthetic construct
  misc_feature 1..28: note = Synthetic: CDH18 forward primer
  source 1..28: mol_type = other DNA
aggaggaaggaaacaattaacttacctg

SEQ ID NO: 2942 - DNA, 23 bp, synthetic construct
  misc_feature 1..23: note = Synthetic: CDH18 reverse primer
  source 1..23: mol_type = other DNA
gtcaatgacaatccacccgaact

SEQ ID NO: 2943 - DNA, 30 bp, synthetic construct
  misc_feature 1..30: note = Synthetic: CDH18 forward primer
  source 1..30: mol_type = other DNA
catacaataatatcatattccctggcaagt

SEQ ID NO: 2944 - DNA, 23 bp, synthetic construct
  misc_feature 1..23: note = Synthetic: CDH18 reverse primer
  source 1..23: mol_type = other DNA
catgtcacagtgggtattagagt

SEQ ID NO: 2945 - DNA, 20 bp, synthetic construct
  misc_feature 1..20: note = Synthetic: CDH18 forward primer
  source 1..20: mol_type = other DNA
ctgccagtctttgcttaata

SEQ ID NO: 2946 - DNA, 17 bp, synthetic construct
  misc_feature 1..17: note = Synthetic: CDH18 reverse primer
  source 1..17: mol_type = other DNA
tgctgctgaggagctca

SEQ ID NO: 2947 - DNA, 22 bp, synthetic construct
  misc_feature 1..22: note = Synthetic: CDH18 forward primer
  source 1..22: mol_type = other DNA
gtctgatatccctccggtactt

SEQ ID NO: 2948 - DNA, 21 bp, synthetic construct
  misc_feature 1..21: note = Synthetic: CDH18 reverse primer
  source 1..21: mol_type = other DNA
atgatgaaggaggcggagagg

SEQ ID NO: 2949 - DNA, 23 bp, synthetic construct
  misc_feature 1..23: note = Synthetic: CDH18 forward primer
  source 1..23: mol_type = other DNA
ggattcctcaaggctgtgatgtc

SEQ ID NO: 2950 - DNA, 23 bp, synthetic construct
  misc_feature 1..23: note = Synthetic: CDH18 reverse primer
  source 1..23: mol_type = other DNA
aagaggatgtacgggagaacgtg

SEQ ID NO: 2951 - DNA, 27 bp, synthetic construct
  misc_feature 1..27: note = Synthetic: CDH18 forward primer
  source 1..27: mol_type = other DNA
ccctaagttgttctttcagattctatt

SEQ ID NO: 2952 - DNA, 20 bp, synthetic construct
  misc_feature 1..20: note = Synthetic: CDH18 reverse primer
  source 1..20: mol_type = other DNA
cagctcgctggattcagcaa

SEQ ID NO: 2953 - DNA, 25 bp, synthetic construct
  misc_feature 1..25: note = Synthetic: CDH18 forward primer
  source 1..25: mol_type = other DNA
aggtagtgataatcctggtctgatt

SEQ ID NO: 2954 - DNA, 25 bp, synthetic construct
  misc_feature 1..25: note = Synthetic: CDH18 reverse primer
  source 1..25: mol_type = other DNA
ctcttcagacttatgcctatgaggg

SEQ ID NO: 2955 - DNA, 26 bp, synthetic construct
  misc_feature 1..26: note = Synthetic: CDH18 forward primer
  source 1..26: mol_type = other DNA
tctggtcccatatgttcttctaaaac

SEQ ID NO: 2956 - DNA, 24 bp, synthetic construct
  misc_feature 1..24: note = Synthetic: CDH18 reverse primer
  source 1..24: mol_type = other DNA
aaccaaacacattgaaggtgaaac

SEQ ID NO: 2957 - DNA, 22 bp, synthetic construct
  misc_feature 1..22: note = Synthetic: CDH18 forward primer
  source 1..22: mol_type = other DNA
gggacgatgatggacttcggtt

SEQ ID NO: 2958 - DNA, 20 bp, synthetic construct
  misc_feature 1..20: note = Synthetic: CDH18 reverse primer
  source 1..20: mol_type = other DNA
caccacagctccatcaaggt

SEQ ID NO: 2959 - DNA, 26 bp, synthetic construct
  misc_feature 1..26: note = Synthetic: CDH18 forward primer
  source 1..26: mol_type = other DNA
aattttggagcgttgtcattgatgtc

SEQ ID NO: 2960 - DNA, 21 bp, synthetic construct
  misc_feature 1..21: note = Synthetic: CDH18 reverse primer
  source 1..21: mol_type = other DNA
agagcagaagacccactatgt

SEQ ID NO: 2961 - DNA, 24 bp, synthetic construct
  misc_feature 1..24: note = Synthetic: CDH18 forward primer
  source 1..24: mol_type = other DNA
caagaggtttgtttgtacgtctat

SEQ ID NO: 2962 - DNA, 22 bp, synthetic construct
  misc_feature 1..22: note = Synthetic: CDH18 reverse primer
  source 1..22: mol_type = other DNA
ataccacgggtgatatccactc

SEQ ID NO: 2963 - DNA, 21 bp, synthetic construct
  misc_feature 1..21: note = Synthetic: CDH18 forward primer
  source 1..21: mol_type = other DNA
ctctgtctaggctttttgttg

SEQ ID NO: 2964 - DNA, 27 bp, synthetic construct
  misc_feature 1..27: note = Synthetic: CDH18 reverse primer
  source 1..27: mol_type = other DNA
agggtgctgggactatatttatcattg

SEQ ID NO: 2965 - DNA, 29 bp, synthetic construct
  misc_feature 1..29: note = Synthetic: CDH12 forward primer
  source 1..29: mol_type = other DNA
taacattgattctgtccatgccatactta

SEQ ID NO: 2966 - DNA, 27 bp, synthetic construct
  misc_feature 1..27: note = Synthetic: CDH12 reverse primer
  source 1..27: mol_type = other DNA
atcgccactaatgaattactagacaga

SEQ ID NO: 2967 - DNA, 26 bp, synthetic construct
  misc_feature 1..26: note = Synthetic: CDH12 forward primer
  source 1..26: mol_type = other DNA
gaaattatactgcgcagtgctttctc

SEQ ID NO: 2968 - DNA, 26 bp, synthetic construct
  misc_feature 1..26: note = Synthetic: CDH12 reverse primer
  source 1..26: mol_type = other DNA
atggggacagctactttacaatagat

SEQ ID NO: 2969 - DNA, 24 bp, synthetic construct
  misc_feature 1..24: note = Synthetic: CDH12 forward primer
  source 1..24: mol_type = other DNA
acgccattacctttcccacatact

SEQ ID NO: 2970 - DNA, 21 bp, synthetic construct
  misc_feature 1..21: note = Synthetic: CDH12 reverse primer
  source 1..21: mol_type = other DNA
aggacaacggtcacatttcca

SEQ ID NO: 2971 - DNA, 22 bp, synthetic construct
  misc_feature 1..22: note = Synthetic: CDH12 forward primer
  source 1..22: mol_type = other DNA
ccatacccagccacgtttaaca

SEQ ID NO: 2972 - DNA, 22 bp, synthetic construct
  misc_feature 1..22: note = Synthetic: CDH12 reverse primer
  source 1..22: mol_type = other DNA
agactttagccacagagccaag

SEQ ID NO: 2973 - DNA, 25 bp, synthetic construct
  misc_feature 1..25: note = Synthetic: CDH12 forward primer
  source 1..25: mol_type = other DNA
gcgaattttgttctcctcaatcact

SEQ ID NO: 2974 - DNA, 25 bp, synthetic construct
  misc_feature 1..25: note = Synthetic: CDH12 reverse primer
  source 1..25: mol_type = other DNA
gtcatccattacgatgatgaaggag

SEQ ID NO: 2975 - DNA, 18 bp, synthetic construct
  misc_feature 1..18: note = Synthetic: CDH12 forward primer
  source 1..18: mol_type = other DNA
gccccgatgtcgaaagcc

SEQ ID NO: 2976 - DNA, 26 bp, synthetic construct
  misc_feature 1..26: note = Synthetic: CDH12 reverse primer
  source 1..26: mol_type = other DNA
ctgatgacctctaaagaagacatcag

SEQ ID NO: 2977 - DNA, 17 bp, synthetic construct
  misc_feature 1..17: note = Synthetic: CDH11 forward primer
  source 1..17: mol_type = other DNA
acccagccacgcttgga

SEQ ID NO: 2978 - DNA, 19 bp, synthetic construct
  misc_feature 1..19: note = Synthetic: CDH11 reverse primer
  source 1..19: mol_type = other DNA
tgcctttgccccagagcgg

SEQ ID NO: 2979 - DNA, 30 bp, synthetic construct
  misc_feature 1..30: note = Synthetic: CDH10 forward primer
  source 1..30: mol_type = other DNA
gttcatccacatcttctatagagattttca

SEQ ID NO: 2980 - DNA, 26 bp, synthetic construct
  misc_feature 1..26: note = Synthetic: CDH10 reverse primer
  source 1..26: mol_type = other DNA
tctgaaagtcgaagcagaaaacaccc

SEQ ID NO: 2981 - DNA, 26 bp, synthetic construct
  misc_feature 1..26: note = Synthetic: CDH10 forward primer
  source 1..26: mol_type = other DNA
cctaggtaataaaaacggggatctac

SEQ ID NO: 2982 - DNA, 22 bp, synthetic construct
  misc_feature 1..22: note = Synthetic: CDH10 reverse primer
  source 1..22: mol_type = other DNA
cgactatgagagccgaagactt

SEQ ID NO: 2983 - DNA, 24 bp, synthetic construct
  misc_feature 1..24: note = Synthetic: CDH10 forward primer
  source 1..24: mol_type = other DNA
acgatggagaattttgccatcact

SEQ ID NO: 2984 - DNA, 27 bp, synthetic construct
  misc_feature 1..27: note = Synthetic: CDH10 reverse primer
  source 1..27: mol_type = other DNA
tctccagaaataatgttcagaaggacg

SEQ ID NO: 2985 - DNA, 26 bp, synthetic construct
  misc_feature 1..26: note = Synthetic: CDH10 forward primer
  source 1..26: mol_type = other DNA
gaacttaaaattctttgctgtggcac

SEQ ID NO: 2986 - DNA, 31 bp, synthetic construct
  misc_feature 1..31: note = Synthetic: CDH10 reverse primer
  source 1..31: mol_type = other DNA
gatttgtcaagaagtgaactatgacaataca

SEQ ID NO: 2987 - DNA, 22 bp, synthetic construct
  misc_feature 1..22: note = Synthetic: CDH10 forward primer
  source 1..22: mol_type = other DNA
tggtctggcattttcacataca

SEQ ID NO: 2988 - DNA, 23 bp, synthetic construct
  misc_feature 1..23: note = Synthetic: CDH10 reverse primer
  source 1..23: mol_type = other DNA
aatcccaaagagacaacacgcgt

SEQ ID NO: 2989 - DNA, 24 bp, synthetic construct
  misc_feature 1..24: note = Synthetic: CDH10 forward primer
  source 1..24: mol_type = other DNA
ggcattgtcattaacatccaaaat

SEQ ID NO: 2990 - DNA, 34 bp, synthetic construct
  misc_feature 1..34: note = Synthetic: CDH10 reverse primer
  source 1..34: mol_type = other DNA
tcttcctaaacaatatttttcttccccttttcca

SEQ ID NO: 2991 - DNA, 20 bp, synthetic construct
  misc_feature 1..20: note = Synthetic: CDH10 forward primer
  source 1..20: mol_type = other DNA
gcaggattgcatgttgcctt

SEQ ID NO: 2992 - DNA, 32 bp, synthetic construct
  misc_feature 1..32: note = Synthetic: CDH10 reverse primer
  source 1..32: mol_type = other DNA
gattcaatagacatgaaatcagtacctatctc

SEQ ID NO: 2993 - DNA, 27 bp, synthetic construct
  misc_feature 1..27: note = Synthetic: CDH10 forward primer
  source 1..27: mol_type = other DNA
tctgaattgggtaatcattgtctgata

SEQ ID NO: 2994 - DNA, 32 bp, synthetic construct
  misc_feature 1..32: note = Synthetic: CDH10 reverse primer
  source 1..32: mol_type = other DNA
agataatactgccagaatcttaaccagaaaaa

SEQ ID NO: 2995 - DNA, 29 bp, synthetic construct
  misc_feature 1..29: note = Synthetic: CDH10 forward primer
  source 1..29: mol_type = other DNA
tccttcagtagtacctgattctaatgaac

SEQ ID NO: 2996 - DNA, 25 bp, synthetic construct
  misc_feature 1..25: note = Synthetic: CDH10 reverse primer
  source 1..25: mol_type = other DNA
tccgggatttcattaatgaaaggct

SEQ ID NO: 2997 - DNA, 22 bp, synthetic construct
  misc_feature 1..22: note = Synthetic: CDH10 forward primer
  source 1..22: mol_type = other DNA
ggggtcaagatcatgctctttt

SEQ ID NO: 2998 - DNA, 20 bp, synthetic construct
  misc_feature 1..20: note = Synthetic: CDH10 reverse primer
  source 1..20: mol_type = other DNA
aaaagctccggcgagatatt

SEQ ID NO: 2999 - DNA, 27 bp, synthetic construct
  misc_feature 1..27: note = Synthetic: CDH10 forward primer
  source 1..27: mol_type = other DNA
aggagtcctccgaggaataaataacgt

SEQ ID NO: 3000 - DNA, 20 bp, synthetic construct
  misc_feature 1..20: note = Synthetic: CDH10 reverse primer
  source 1..20: mol_type = other DNA
acacccaggcctttgatatc

SEQ ID NO: 3001 - DNA, 19 bp, synthetic construct
  misc_feature 1..19: note = Synthetic: CDH10 forward primer
  source 1..19: mol_type = other DNA
tgcaggattcctcagggtg

SEQ ID NO: 3002 - DNA, 21 bp, synthetic construct
  misc_feature 1..21: note = Synthetic: CDH10 reverse primer
  source 1..21: mol_type = other DNA
aaaaagagcctctgatcttgt

SEQ ID NO: 3003 - DNA, 25 bp, synthetic construct
  misc_feature 1..25: note = Synthetic: CDH10 forward primer
  source 1..25: mol_type = other DNA
ccctcatcgttatagctcacaatgt

SEQ ID NO: 3004 - DNA, 24 bp, synthetic construct
  misc_feature 1..24: note = Synthetic: CDH10 reverse primer
  source 1..24: mol_type = other DNA
gtttgcagctctgaaaagacagcg

SEQ ID NO: 3005 - DNA, 24 bp, synthetic construct
  misc_feature 1..24: note = Synthetic: CDH10 forward primer
  source 1..24: mol_type = other DNA
ggcctcagagttcttctgttaata

SEQ ID NO: 3006 - DNA, 21 bp, synthetic construct
  misc_feature 1..21: note = Synthetic: CDH10 reverse primer
  source 1..21: mol_type = other DNA
acaaggcgaattgatagggag

SEQ ID NO: 3007 - DNA, 24 bp, synthetic construct
  misc_feature 1..24: note = Synthetic: CDH10 forward primer
  source 1..24: mol_type = other DNA
ttgtgcgcgtagagtataaaaggc

SEQ ID NO: 3008 - DNA, 25 bp, synthetic construct
  misc_feature 1..25: note = Synthetic: CDH10 reverse primer
  source 1..25: mol_type = other DNA
agatggagctggtactctttttatt

SEQ ID NO: 3009 - DNA, 25 bp, synthetic construct
  misc_feature 1..25: note = Synthetic: CDH10 forward primer
  source 1..25: mol_type = other DNA
tgtggcatgaatatcacctgttttt

SEQ ID NO: 3010 - DNA, 28 bp, synthetic construct
  misc_feature 1..28: note = Synthetic: CDH10 reverse primer
  source 1..28: mol_type = other DNA
tagctacattcagaccaagataaaggag

SEQ ID NO: 3011 - DNA, 22 bp, synthetic construct
  misc_feature 1..22: note = Synthetic: CDH10 forward primer
  source 1..22: mol_type = other DNA
atagggctgcccttgaagtatg

SEQ ID NO: 3012 - DNA, 21 bp, synthetic construct
  misc_feature 1..21: note = Synthetic: CDH10 reverse primer
  source 1..21: mol_type = other DNA
tggtgcaagtcacagctacag

SEQ ID NO: 3013 - DNA, 22 bp, synthetic construct
  misc_feature 1..22: note = Synthetic: CDH10 forward primer
  source 1..22: mol_type = other DNA
catatgaagggtcatcggcatc

SEQ ID NO: 3014 - DNA, 25 bp, synthetic construct
  misc_feature 1..25: note = Synthetic: CDH10 reverse primer
  source 1..25: mol_type = other DNA
cttctggtactgtgcagaactaagc

SEQ ID NO: 3015 - DNA, 21 bp, synthetic construct
  misc_feature 1..21: note = Synthetic: CDH10 forward primer
  source 1..21: mol_type = other DNA
acgtggtgggttgtcattgac

SEQ ID NO: 3016 - DNA, 21 bp, synthetic construct
  misc_feature 1..21: note = Synthetic: CDH10 reverse primer
  source 1..21: mol_type = other DNA
tcatccaggccaaagacatgg

SEQ ID NO: 3017 - DNA, 20 bp, synthetic construct
  misc_feature 1..20: note = Synthetic: CDH10 forward primer
  source 1..20: mol_type = other DNA
ccgataagcctcccatctgg

SEQ ID NO: 3018 - DNA, 25 bp, synthetic construct
  misc_feature 1..25: note = Synthetic: CDH10 reverse primer
  source 1..25: mol_type = other DNA
ctttaccgaacatgaacagagaaaa

SEQ ID NO: 3019 - DNA, 20 bp, synthetic construct
  misc_feature 1..20: note = Synthetic: CDH1 forward primer
  source 1..20: mol_type = other DNA
cccggttccatctacctttc

SEQ ID NO: 3020 - DNA, 20 bp, synthetic construct
  misc_feature 1..20: note = Synthetic: CDH1 reverse primer
  source 1..20: mol_type = other DNA
agctctcggcgtcaaagcca

SEQ ID NO: 3021 - DNA, 23 bp, synthetic construct
  misc_feature 1..23: note = Synthetic: CDH1 forward primer
  source 1..23: mol_type = other DNA
aaagtgcagcttgtctaaacctt

SEQ ID NO: 3022 - DNA, 25 bp, synthetic construct
  misc_feature 1..25: note = Synthetic: CDH1 reverse primer
  source 1..25: mol_type = other DNA
attgtaggtgttcacatcatcgtcc

SEQ ID NO: 3023 - DNA, 21 bp, synthetic construct
  misc_feature 1..21: note = Synthetic: CDH1 forward primer
  source 1..21: mol_type = other DNA
ctctgtgatggaggtcacagc

SEQ ID NO: 3024 - DNA, 21 bp, synthetic construct
  misc_feature 1..21: note = Synthetic: CDH1 reverse primer
  source 1..21: mol_type = other DNA
cagggagctcaggatcttggc

SEQ ID NO: 3025 - DNA, 20 bp, synthetic construct
  misc_feature 1..20: note = Synthetic: CD93 forward primer
  source 1..20: mol_type = other DNA
gcttggagatgcacgagttc

SEQ ID NO: 3026 - DNA, 19 bp, synthetic construct
  misc_feature 1..19: note = Synthetic: CD93 reverse primer
  source 1..19: mol_type = other DNA
ccctagtctgccgctgaag

SEQ ID NO: 3027 - DNA, 28 bp, synthetic construct
  misc_feature 1..28: note = Synthetic: CD58 forward primer
  source 1..28: mol_type = other DNA
atacaggttgtcaaaatgattgatgatg

SEQ ID NO: 3028 - DNA, 25 bp, synthetic construct
  misc_feature 1..25: note = Synthetic: CD58 reverse primer
  source 1..25: mol_type = other DNA
caatgtaaacgtaactcaaccagta

SEQ ID NO: 3029 - DNA, 22 bp, synthetic construct
  misc_feature 1..22: note = Synthetic: CD58 forward primer
  source 1..22: mol_type = other DNA
ttttgtggaagatcattttcca

SEQ ID NO: 3030 - DNA, 27 bp, synthetic construct
  misc_feature 1..27: note = Synthetic: CD58 reverse primer
  source 1..27: mol_type = other DNA
agccatcgaggacttataatgtactca

SEQ ID NO: 3031 - DNA, 22 bp, synthetic construct
  misc_feature 1..22: note = Synthetic: CD1E forward primer
  source 1..22: mol_type = other DNA
tttctctgcctttcccctttat

SEQ ID NO: 3032 - DNA, 19 bp, synthetic construct
  misc_feature 1..19: note = Synthetic: CD1E reverse primer
  source 1..19: mol_type = other DNA
ctgagtgttggctcccatg

SEQ ID NO: 3033 - DNA, 19 bp, synthetic construct
  misc_feature 1..19: note = Synthetic: CD1E forward primer
  source 1..19: mol_type = other DNA
acccagccctgtctttctc

SEQ ID NO: 3034 - DNA, 22 bp, synthetic construct
  misc_feature 1..22: note = Synthetic: CD1E reverse primer
  source 1..22: mol_type = other DNA
ttgtgccaagcagaactgatgt

SEQ ID NO: 3035 - DNA, 26 bp, synthetic construct
  misc_feature 1..26: note = Synthetic: CD1E forward primer
  source 1..26: mol_type = other DNA
atcctgatctgtttgactgtgatagt

SEQ ID NO: 3036 - DNA, 26 bp, synthetic construct
  misc_feature 1..26: note = Synthetic: CD1E reverse primer
  source 1..26: mol_type = other DNA
gctgaagaaacaaagaacaagaaaaa

SEQ ID NO: 3037 - DNA, 19 bp, synthetic construct
  misc_feature 1..19: note = Synthetic: CCND3 forward primer
  source 1..19: mol_type = other DNA
ctcctctgcttagtggcca

SEQ ID NO: 3038 - DNA, 17 bp, synthetic construct
  misc_feature 1..17: note = Synthetic: CCND3 reverse primer
  source 1..17: mol_type = other DNA
ccagcagccaagggccc

SEQ ID NO: 3039 - DNA, 22 bp, synthetic construct
  misc_feature 1..22: note = Synthetic: CCND3 forward primer
  source 1..22: mol_type = other DNA
atctgtaggagtgctggtctgg

SEQ ID NO: 3040 - DNA, 20 bp, synthetic construct
  misc_feature 1..20: note = Synthetic: CCND3 reverse primer
  source 1..20: mol_type = other DNA
ctgtcaggagcagatcgaag

SEQ ID NO: 3041 - DNA, 30 bp, synthetic construct
  misc_feature 1..30: note = Synthetic: CCDC39 forward primer
  source 1..30: mol_type = other DNA
agatgttccatgactacacgatataatcaa

SEQ ID NO: 3042 - DNA, 26 bp, synthetic construct
  misc_feature 1..26: note = Synthetic: CCDC39 reverse primer
  source 1..26: mol_type = other DNA
gttacgtgagtatgaagagcgaatta

SEQ ID NO: 3043 - DNA, 30 bp, synthetic construct
  misc_feature 1..30: note = Synthetic: CCDC39 forward primer
  source 1..30: mol_type = other DNA
tgcttaacatttttgaagtgagaagtcata

SEQ ID NO: 3044 - DNA, 22 bp, synthetic construct
  misc_feature 1..22: note = Synthetic: CCDC39 reverse primer
  source 1..22: mol_type = other DNA
gaaggatgaaagagcaagcttg

SEQ ID NO: 3045 - DNA, 26 bp, synthetic construct
  misc_feature 1..26: note = Synthetic: CCDC39 forward primer
  source 1..26: mol_type = other DNA
tgaacatacaagccagtcttttttga

SEQ ID NO: 3046 - DNA, 26 bp, synthetic construct
  misc_feature 1..26: note = Synthetic: CCDC39 reverse primer
  source 1..26: mol_type = other DNA
gaaaagaatttctgtggctgatcgta

SEQ ID NO: 3047 - DNA, 22 bp, synthetic construct
  misc_feature 1..22: note = Synthetic: CCDC39 forward primer
  source 1..22: mol_type = other DNA
gtcctgatatgccgttctacat

SEQ ID NO: 3048 - DNA, 27 bp, synthetic construct
  misc_feature 1..27: note = Synthetic: CCDC39 reverse primer
  source 1..27: mol_type = other DNA
aaagtgagattgggaataacacagagt

SEQ ID NO: 3049 - DNA, 24 bp, synthetic construct
  misc_feature 1..24: note = Synthetic: CCDC168 forward primer
  source 1..24: mol_type = other DNA
cttaaggtttcagggggaatagtc

SEQ ID NO: 3050 - DNA, 23 bp, synthetic construct
  misc_feature 1..23: note = Synthetic: CCDC168 reverse primer
  source 1..23: mol_type = other DNA
aaagaaaacaaaaccggcccttt

SEQ ID NO: 3051 - DNA, 19 bp, synthetic construct
  misc_feature 1..19: note = Synthetic: CCDC141 forward primer
  source 1..19: mol_type = other DNA
ctgggagaggaggcaagga

SEQ ID NO: 3052 - DNA, 20 bp, synthetic construct
  misc_feature 1..20: note = Synthetic: CCDC141 reverse primer
  source 1..20: mol_type = other DNA
tccactgacaaggagggtgg

SEQ ID NO: 3053 - DNA, 21 bp, synthetic construct
  misc_feature 1..21: note = Synthetic: CCDC141 forward primer
  source 1..21: mol_type = other DNA
cccctgagagcatgtcttcag

SEQ ID NO: 3054 - DNA, 21 bp, synthetic construct
  misc_feature 1..21: note = Synthetic: CCDC141 reverse primer
  source 1..21: mol_type = other DNA
gcgactaccacaagacctgaa

SEQ ID NO: 3055 - DNA, 21 bp, synthetic construct
  misc_feature 1..21: note = Synthetic: CASP5 forward primer
  source 1..21: mol_type = other DNA
cttcttccccatttcatacag

SEQ ID NO: 3056 - DNA, 32 bp, synthetic construct
  misc_feature 1..32: note = Synthetic: CASP5 reverse primer
  source 1..32: mol_type = other DNA
gaatctacaaatatactcaaactttgtcctcg

SEQ ID NO: 3057 - DNA, 26 bp, synthetic construct
  misc_feature 1..26: note = Synthetic: CASP5 forward primer
  source 1..26: mol_type = other DNA
ttttacacagtctcaggaattcttca

SEQ ID NO: 3058 - DNA, 21 bp, synthetic construct
  misc_feature 1..21: note = Synthetic: CASP5 reverse primer
  source 1..21: mol_type = other DNA
ttctgcaaatcgaggctggac

SEQ ID NO: 3059 - DNA, 21 bp, synthetic construct
  misc_feature 1..21: note = Synthetic: CACNA1E forward primer
  source 1..21: mol_type = other DNA
tggactttgtggtggtcgttg

SEQ ID NO: 3060 - DNA, 22 bp, synthetic construct
  misc_feature 1..22: note = Synthetic: CACNA1E reverse primer
  source 1..22: mol_type = other DNA
gaggggaaggaagggaatcaaa

SEQ ID NO: 3061 - DNA, 29 bp, synthetic construct
  misc_feature 1..29: note = Synthetic: CACNA1E forward primer
  source 1..29: mol_type = other DNA
catttttatttctcccccattccatatga

SEQ ID NO: 3062 - DNA, 20 bp, synthetic construct
  misc_feature 1..20: note = Synthetic: CACNA1E reverse primer
  source 1..20: mol_type = other DNA
ccttagaactcggagcaccc

SEQ ID NO: 3063 - DNA, 22 bp, synthetic construct
  misc_feature 1..22: note = Synthetic: CACNA1E forward primer
  source 1..22: mol_type = other DNA
ggacatcaagaccatcaagtct

SEQ ID NO: 3064 - DNA, 20 bp, synthetic construct
  misc_feature 1..20: note = Synthetic: CACNA1E reverse primer
  source 1..20: mol_type = other DNA
ccttgagcttgggcaagcgc

SEQ ID NO: 3065 - DNA, 23 bp, synthetic construct
  misc_feature 1..23: note = Synthetic: CACNA1E forward primer
  source 1..23: mol_type = other DNA
cctgagctctgctttaggtttcc

SEQ ID NO: 3066 - DNA, 19 bp, synthetic construct
  misc_feature 1..19: note = Synthetic: CACNA1E reverse primer
  source 1..19: mol_type = other DNA
tggaggagtcccgagtcag

SEQ ID NO: 3067 - DNA, 20 bp, synthetic construct
  misc_feature 1..20: note = Synthetic: CACNA1E forward primer
  source 1..20: mol_type = other DNA
tgtttgtggccgtcatcatg

SEQ ID NO: 3068 - DNA, 20 bp, synthetic construct
  misc_feature 1..20: note = Synthetic: CACNA1E reverse primer
  source 1..20: mol_type = other DNA
ggacaaactcgtccaagtgg

SEQ ID NO: 3069 - DNA, 22 bp, synthetic construct
  misc_feature 1..22: note = Synthetic: CACNA1E forward primer
  source 1..22: mol_type = other DNA
gtttctctgggggcttgtattt

SEQ ID NO: 3070 - DNA, 23 bp, synthetic construct
  misc_feature 1..23: note = Synthetic: CACNA1E reverse primer
  source 1..23: mol_type = other DNA
aggaatttgaacgcttatcccga

SEQ ID NO: 3071 - DNA, 23 bp, synthetic construct
  misc_feature 1..23: note = Synthetic: CACNA1E forward primer
  source 1..23: mol_type = other DNA
agctccatgagacgttcattttc

SEQ ID NO: 3072 - DNA, 20 bp, synthetic construct
  misc_feature 1..20: note = Synthetic: CACNA1E reverse primer
  source 1..20: mol_type = other DNA
cttcgctccatggagaattc

SEQ ID NO: 3073 - DNA, 19 bp, synthetic construct
  misc_feature 1..19: note = Synthetic: CACNA1E forward primer
  source 1..19: mol_type = other DNA
cctctcacaggccacaagt

SEQ ID NO: 3074 - DNA, 21 bp, synthetic construct
  misc_feature 1..21: note = Synthetic: CACNA1E reverse primer
  source 1..21: mol_type = other DNA
ctgaattgcagcgggagacat

SEQ ID NO: 3075 - DNA, 18 bp, synthetic construct
  misc_feature 1..18: note = Synthetic: CACNA1E forward primer
  source 1..18: mol_type = other DNA
acaccagcaccccaagaa

SEQ ID NO: 3076 - DNA, 21 bp, synthetic construct
  misc_feature 1..21: note = Synthetic: CACNA1E reverse primer
  source 1..21: mol_type = other DNA
gggagctgtaggaaaggaggg

SEQ ID NO: 3077 - DNA, 17 bp, synthetic construct
  misc_feature 1..17: note = Synthetic: CACNA1E forward primer
  source 1..17: mol_type = other DNA
cacccgtcccgccaaag

SEQ ID NO: 3078 - DNA, 17 bp, synthetic construct
  misc_feature 1..17: note = Synthetic: CACNA1E reverse primer
  source 1..17: mol_type = other DNA
tgctgcccgcgtgtcga

SEQ ID NO: 3079 - DNA, 23 bp, synthetic construct
  misc_feature 1..23: note = Synthetic: CACNA1C forward primer
  source 1..23: mol_type = other DNA
cccttattggtgggaatgtgtca

SEQ ID NO: 3080 - DNA, 20 bp, synthetic construct
  misc_feature 1..20: note = Synthetic: CACNA1C reverse primer
  source 1..20: mol_type = other DNA
aaaagaggggccgccataag

SEQ ID NO: 3081 - DNA, 26 bp, synthetic construct
  misc_feature 1..26: note = Synthetic: CACNA1C forward primer
  source 1..26: mol_type = other DNA
ttcggtgatgtatgatgggatcatgg

SEQ ID NO: 3082 - DNA, 26 bp, synthetic construct
  misc_feature 1..26: note = Synthetic: CACNA1C reverse primer
  source 1..26: mol_type = other DNA
acagtttccacagatgaagaggatga

SEQ ID NO: 3083 - DNA, 22 bp, synthetic construct
  misc_feature 1..22: note = Synthetic: C7 forward primer
  source 1..22: mol_type = other DNA
cgtgaatgcaataacccacctc

SEQ ID NO: 3084 - DNA, 22 bp, synthetic construct
  misc_feature 1..22: note = Synthetic: C7 reverse primer
  source 1..22: mol_type = other DNA
ctcctcatcttcgcattgtgtg

SEQ ID NO: 3085 - DNA, 22 bp, synthetic construct
  misc_feature 1..22: note = Synthetic: C7 forward primer
  source 1..22: mol_type = other DNA
agatcctgcgttggagaaacga

SEQ ID NO: 3086 - DNA, 23 bp, synthetic construct
  misc_feature 1..23: note = Synthetic: C7 reverse primer
  source 1..23: mol_type = other DNA
aactgcagagggtactgtgttct

SEQ ID NO: 3087 - DNA, 20 bp, synthetic construct
  misc_feature 1..20: note = Synthetic: C6 forward primer
  source 1..20: mol_type = other DNA
agtcttcctcttgtcgcttc

SEQ ID NO: 3088 - DNA, 28 bp, synthetic construct
  misc_feature 1..28: note = Synthetic: C6 reverse primer
  source 1..28: mol_type = other DNA
agtacctgtgatgctacttataagagat

SEQ ID NO: 3089 - DNA, 24 bp, synthetic construct
  misc_feature 1..24: note = Synthetic: C6 forward primer
  source 1..24: mol_type = other DNA
aggattattgcattctcgggttct

SEQ ID NO: 3090 - DNA, 22 bp, synthetic construct
  misc_feature 1..22: note = Synthetic: C6 reverse primer
  source 1..22: mol_type = other DNA
agatgcagtagacggacagtgg

SEQ ID NO: 3091 - DNA, 30 bp, synthetic construct
  misc_feature 1..30: note = Synthetic: C6 forward primer
  source 1..30: mol_type = other DNA
cagaattatggttgatattttcacttctct

SEQ ID NO: 3092 - DNA, 33 bp, synthetic construct
  misc_feature 1..33: note = Synthetic: C6 reverse primer
  source 1..33: mol_type = other DNA
aaacagatttctacaaggatttaacttctcttg

SEQ ID NO: 3093 - DNA, 24 bp, synthetic construct
  misc_feature 1..24: note = Synthetic: C6 forward primer
  source 1..24: mol_type = other DNA
ctgacttgagaatgagccttgttg

SEQ ID NO: 3094 - DNA, 32 bp, synthetic construct
  misc_feature 1..32: note = Synthetic: C6 reverse primer
  source 1..32: mol_type = other DNA
attttacatggatttttctccaggtacaaact

SEQ ID NO: 3095 - DNA, 23 bp, synthetic construct
  misc_feature 1..23: note = Synthetic: C2orf16 forward primer
  source 1..23: mol_type = other DNA
aagtctacatcaggcgaggacaa

SEQ ID NO: 3096 - DNA, 21 bp, synthetic construct
  misc_feature 1..21: note = Synthetic: C2orf16 reverse primer
  source 1..21: mol_type = other DNA
catagtgcccaggtgctctag

SEQ ID NO: 3097 - DNA, 23 bp, synthetic construct
  misc_feature 1..23: note = Synthetic: C2CD5 forward primer
  source 1..23: mol_type = other DNA
ctctgtctggcctcatttgatgc

SEQ ID NO: 3098 - DNA, 23 bp, synthetic construct
  misc_feature 1..23: note = Synthetic: C2CD5 reverse primer
  source 1..23: mol_type = other DNA
tgtggtcaatgaagacccagaat

SEQ ID NO: 3099 - DNA, 26 bp, synthetic construct
  misc_feature 1..26: note = Synthetic: C20orf26 forward primer
  source 1..26: mol_type = other DNA
cctccagggtttagaactagtaaccg

SEQ ID NO: 3100 - DNA, 21 bp, synthetic construct
  misc_feature 1..21: note = Synthetic: C20orf26 reverse primer
  source 1..21: mol_type = other DNA
ccctagaaaggcacgtgatgg

SEQ ID NO: 3101 - DNA, 22 bp, synthetic construct
  misc_feature 1..22: note = Synthetic: C1orf173 forward primer
  source 1..22: mol_type = other DNA
gtgccttctgtgatgaggtttc

SEQ ID NO: 3102 - DNA, 24 bp, synthetic construct
  misc_feature 1..24: note = Synthetic: C1orf173 reverse primer
  source 1..24: mol_type = other DNA
aaggacaggctgatgttcaaatga

SEQ ID NO: 3103 - DNA, 21 bp, synthetic construct
  misc_feature 1..21: note = Synthetic: C1orf173 forward primer
  source 1..21: mol_type = other DNA
ccaaaggtgactgcggtattc

SEQ ID NO: 3104 - DNA, 29 bp, synthetic construct
  misc_feature 1..29: note = Synthetic: C1orf173 reverse primer
  source 1..29: mol_type = other DNA
gatgaggagaaacaaggtgaaaaatctaa

SEQ ID NO: 3105 - DNA, 26 bp, synthetic construct
  misc_feature 1..26: note = Synthetic: C1orf173 forward primer
  source 1..26: mol_type = other DNA
gaaatcttctccttctccatgtttca

SEQ ID NO: 3106 - DNA, 25 bp, synthetic construct
  misc_feature 1..25: note = Synthetic: C1orf173 reverse primer
  source 1..25: mol_type = other DNA
gttacatgatgcctattcctcctcc

SEQ ID NO: 3107 - DNA, 27 bp, synthetic construct
  misc_feature 1..27: note = Synthetic: C1orf173 forward primer
  source 1..27: mol_type = other DNA
ttttctcttgtgattttcccagttggg

SEQ ID NO: 3108 - DNA, 25 bp, synthetic construct
  misc_feature 1..25: note = Synthetic: C1orf173 reverse primer
  source 1..25: mol_type = other DNA
ttcaggaactccataggcaattcac

SEQ ID NO: 3109 - DNA, 22 bp, synthetic construct
  misc_feature 1..22: note = Synthetic: C17orf80 forward primer
  source 1..22: mol_type = other DNA
gacttaccctgggagtagagac

SEQ ID NO: 3110 - DNA, 21 bp, synthetic construct
  misc_feature 1..21: note = Synthetic: C17orf80 reverse primer
  source 1..21: mol_type = other DNA
tgacagtccgttcctgctttt

SEQ ID NO: 3111 - DNA, 25 bp, synthetic construct
  misc_feature 1..25: note = Synthetic: C17orf80 forward primer
  source 1..25: mol_type = other DNA
agagaaaagtatgtctgcaacagaa

SEQ ID NO: 3112 - DNA, 23 bp, synthetic construct
  misc_feature 1..23: note = Synthetic: C17orf80 reverse primer
  source 1..23: mol_type = other DNA
gactcctttcctgtgactgaatc

SEQ ID NO: 3113 - DNA, 22 bp, synthetic construct
  misc_feature 1..22: note = Synthetic: C17orf74 forward primer
  source 1..22: mol_type = other DNA
caccatttctccaaccatcaca

SEQ ID NO: 3114 - DNA, 17 bp, synthetic construct
  misc_feature 1..17: note = Synthetic: C17orf74 reverse primer
  source 1..17: mol_type = other DNA
ctggtggttgcagcagc

SEQ ID NO: 3115 - DNA, 28 bp, synthetic construct
  misc_feature 1..28: note = Synthetic: C12orf55 forward primer
  source 1..28: mol_type = other DNA
atgattcttctttattaaatatctgaaa

SEQ ID NO: 3116 - DNA, 28 bp, synthetic construct
  misc_feature 1..28: note = Synthetic: C12orf55 reverse primer
  source 1..28: mol_type = other DNA
ataacttaatattagaggattcaagtaa

SEQ ID NO: 3117 - DNA, 22 bp, synthetic construct
  misc_feature 1..22: note = Synthetic: C12orf55 forward primer
  source 1..22: mol_type = other DNA
agcacaacgatacctgatggat

SEQ ID NO: 3118 - DNA, 24 bp, synthetic construct
  misc_feature 1..24: note = Synthetic: C12orf55 reverse primer
  source 1..24: mol_type = other DNA
cagggcatctcttcaagtgataga

SEQ ID NO: 3119 - DNA, 21 bp, synthetic construct
  misc_feature 1..21: note = Synthetic: C10orf71 forward primer
  source 1..21: mol_type = other DNA
gcatttggagccagttaccgt

SEQ ID NO: 3120 - DNA, 23 bp, synthetic construct
  misc_feature 1..23: note = Synthetic: C10orf71 reverse primer
  source 1..23: mol_type = other DNA
gaacgtacttgggtagctgttgg

SEQ ID NO: 3121 - DNA, 17 bp, synthetic construct
  misc_feature 1..17: note = Synthetic: BRINP3 forward primer
  source 1..17: mol_type = other DNA
cagcgggtgcggttgtc

SEQ ID NO: 3122 - DNA, 23 bp, synthetic construct
  misc_feature 1..23: note = Synthetic: BRINP3 reverse primer
  source 1..23: mol_type = other DNA
ttttcagaagagacgcactcgtg

SEQ ID NO: 3123 - DNA, 19 bp, synthetic construct
  misc_feature 1..19: note = Synthetic: BRINP3 forward primer
  source 1..19: mol_type = other DNA
cctggtcattcggacacgt

SEQ ID NO: 3124 - DNA, 26 bp, synthetic construct
  misc_feature 1..26: note = Synthetic: BRINP3 reverse primer
  source 1..26: mol_type = other DNA
ccagtcttttctctactgcaatgaga

SEQ ID NO: 3125 - DNA, 22 bp, synthetic construct
  misc_feature 1..22: note = Synthetic: BRINP3 forward primer
  source 1..22: mol_type = other DNA
acaggcataaaccagctctcag

SEQ ID NO: 3126 - DNA, 26 bp, synthetic construct
  misc_feature 1..26: note = Synthetic: BRINP3 reverse primer
  source 1..26: mol_type = other DNA
ttaactaaaaacagcaccttggagcc

SEQ ID NO: 3127 - DNA, 25 bp, synthetic construct
  misc_feature 1..25: note = Synthetic: BRINP3 forward primer
  source 1..25: mol_type = other DNA
gaagggattgacataaacagccaac

SEQ ID NO: 3128 - DNA, 28 bp, synthetic construct
  misc_feature 1..28: note = Synthetic: BRINP3 reverse primer
  source 1..28: mol_type = other DNA
aagtcaagtctggtccatatgattttgg

SEQ ID NO: 3129 - DNA, 21 bp, synthetic construct
  misc_feature 1..21: note = Synthetic: BRINP3 forward primer
  source 1..21: mol_type = other DNA
cggcttctgtccacaaaatct

SEQ ID NO: 3130 - DNA, 19 bp, synthetic construct
  misc_feature 1..19: note = Synthetic: BRINP3 reverse primer
  source 1..19: mol_type = other DNA
acaagccccttcgactggc

SEQ ID NO: 3131 - DNA, 23 bp, synthetic construct
  misc_feature 1..23: note = Synthetic: BRINP3 forward primer
  source 1..23: mol_type = other DNA
tggaagggtcccttatcagagag

SEQ ID NO: 3132 - DNA, 23 bp, synthetic construct
  misc_feature 1..23: note = Synthetic: BRINP3 reverse primer
  source 1..23: mol_type = other DNA
tcttcattgctgggttttagcgg

SEQ ID NO: 3133 - DNA, 27 bp, synthetic construct
  misc_feature 1..27: note = Synthetic: BRINP3 forward primer
  source 1..27: mol_type = other DNA
tagtagacagcttgagtctatgacgaa

SEQ ID NO: 3134 - DNA, 21 bp, synthetic construct
  misc_feature 1..21: note = Synthetic: BRINP3 reverse primer
  source 1..21: mol_type = other DNA
ctatactcagggatcccagga

SEQ ID NO: 3135 - DNA, 25 bp, synthetic construct
  misc_feature 1..25: note = Synthetic: BRINP3 forward primer
  source 1..25: mol_type = other DNA
acggtctctgatctctagtagttgc

SEQ ID NO: 3136 - DNA, 23 bp, synthetic construct
  misc_feature 1..23: note = Synthetic: BRINP3 reverse primer
  source 1..23: mol_type = other DNA
acctgattttgcagctggactac

SEQ ID NO: 3137 - DNA, 27 bp, synthetic construct
  misc_feature 1..27: note = Synthetic: BRINP3 forward primer
  source 1..27: mol_type = other DNA
ttccacaaaagcactgtaaaaactcct

SEQ ID NO: 3138 - DNA, 22 bp, synthetic construct
  misc_feature 1..22: note = Synthetic: BRINP3 reverse primer
  source 1..22: mol_type = other DNA
gcgtttaatgccaaattgccaa

SEQ ID NO: 3139 - DNA, 25 bp, synthetic construct
  misc_feature 1..25: note = Synthetic: BRINP3 forward primer
  source 1..25: mol_type = other DNA
gtcgtgtcataatccattgtgtttg

SEQ ID NO: 3140 - DNA, 22 bp, synthetic construct
  misc_feature 1..22: note = Synthetic: BRINP3 reverse primer
  source 1..22: mol_type = other DNA
ggtggtgaggatccaatctgct

SEQ ID NO: 3141 - DNA, 27 bp, synthetic construct
  misc_feature 1..27: note = Synthetic: BRINP3 forward primer
  source 1..27: mol_type = other DNA
gtagcagatagcaagaaatgtgtccca

SEQ ID NO: 3142 - DNA, 20 bp, synthetic construct
  misc_feature 1..20: note = Synthetic: BRINP3 reverse primer
  source 1..20: mol_type = other DNA
tcttgcccctgaattcttcc

SEQ ID NO: 3143 - DNA, 23 bp, synthetic construct
  misc_feature 1..23: note = Synthetic: BRINP3 forward primer
  source 1..23: mol_type = other DNA
gacgtcccaaaagtcttatgttg

SEQ ID NO: 3144 - DNA, 22 bp, synthetic construct
  misc_feature 1..22: note = Synthetic: BRINP3 reverse primer
  source 1..22: mol_type = other DNA
cgctggaaagtaaataaccttg

SEQ ID NO: 3145 - DNA, 23 bp, synthetic construct
  misc_feature 1..23: note = Synthetic: BRINP2 forward primer
  source 1..23: mol_type = other DNA
tctactatgagcccctggagatg

SEQ ID NO: 3146 - DNA, 20 bp, synthetic construct
  misc_feature 1..20: note = Synthetic: BRINP2 reverse primer
  source 1..20: mol_type = other DNA
tgtagccaaagacctgcaag

SEQ ID NO: 3147 - DNA, 29 bp, synthetic construct
  misc_feature 1..29: note = Synthetic: BRINP2 forward primer
  source 1..29: mol_type = other DNA
ctctaagaatttgggttacatgaaaatta

SEQ ID NO: 3148 - DNA, 21 bp, synthetic construct
  misc_feature 1..21: note = Synthetic: BRINP2 reverse primer
  source 1..21: mol_type = other DNA
ggatagcatctgggtcaaagg

SEQ ID NO: 3149 - DNA, 23 bp, synthetic construct
  misc_feature 1..23: note = Synthetic: BRAF forward primer
  source 1..23: mol_type = other DNA
actttcccttgtagactgttcca

SEQ ID NO: 3150 - DNA, 23 bp, synthetic construct
  misc_feature 1..23: note = Synthetic: BRAF reverse primer
  source 1..23: mol_type = other DNA
tcgagtgatgattgggagattcc

SEQ ID NO: 3151 - DNA, 28 bp, synthetic construct
  misc_feature 1..28: note = Synthetic: BRAF forward primer
  source 1..28: mol_type = other DNA
aaaaatagcctcaattcttaccatccac

SEQ ID NO: 3152 - DNA, 27 bp, synthetic construct
  misc_feature 1..27: note = Synthetic: BRAF reverse primer
  source 1..27: mol_type = other DNA
tatatttcttcatgaagacctcacagt

SEQ ID NO: 3153 - DNA, 27 bp, synthetic construct
  misc_feature 1..27: note = Synthetic: BRAF forward primer
  source 1..27: mol_type = other DNA
actgtagctagaccaaaatcacctatt

SEQ ID NO: 3154 - DNA, 26 bp, synthetic construct
  misc_feature 1..26: note = Synthetic: BRAF reverse primer
  source 1..26: mol_type = other DNA
cttgctctgataggaaaatgagatct

SEQ ID NO: 3155 - DNA, 23 bp, synthetic construct
  misc_feature 1..23: note = Synthetic: BMPR2 forward primer
  source 1..23: mol_type = other DNA
cagcacacctttgactatagggg

SEQ ID NO: 3156 - DNA, 21 bp, synthetic construct
  misc_feature 1..21: note = Synthetic: BMPR2 reverse primer
  source 1..21: mol_type = other DNA
ttgtttcagggctggggattc

SEQ ID NO: 3157 - DNA, 22 bp, synthetic construct
  misc_feature 1..22: note = Synthetic: BEND4 forward primer
  source 1..22: mol_type = other DNA
ggtgatcgatcccttcataaaa

SEQ ID NO: 3158 - DNA, 20 bp, synthetic construct
  misc_feature 1..20: note = Synthetic: BEND4 reverse primer
  source 1..20: mol_type = other DNA
gtgttcagcgacgctgtcgg

SEQ ID NO: 3159 - DNA, 17 bp, synthetic construct
  misc_feature 1..17: note = Synthetic: BEND4 forward primer
  source 1..17: mol_type = other DNA
ctgtcgggcgtgaccga

SEQ ID NO: 3160 - DNA, 22 bp, synthetic construct
  misc_feature 1..22: note = Synthetic: BEND4 reverse primer
  source 1..22: mol_type = other DNA
ctcggaagagcagataaacaaa

SEQ ID NO: 3161 - DNA, 18 bp, synthetic construct
  misc_feature 1..18: note = Synthetic: BCORL1 forward primer
  source 1..18: mol_type = other DNA
gcccaaggccgagttcta

SEQ ID NO: 3162 - DNA, 17 bp, synthetic construct
  misc_feature 1..17: note = Synthetic: BCORL1 reverse primer
  source 1..17: mol_type = other DNA
ctcgtaccgcaccagct

SEQ ID NO: 3163 - DNA, 20 bp, synthetic construct
  misc_feature 1..20: note = Synthetic: BCORL1 forward primer
  source 1..20: mol_type = other DNA
tcctctgagactgtggagct

SEQ ID NO: 3164 - DNA, 23 bp, synthetic construct
  misc_feature 1..23: note = Synthetic: BCORL1 reverse primer
  source 1..23: mol_type = other DNA
aactgttgcaagactggaattcc

SEQ ID NO: 3165 - DNA, 17 bp, synthetic construct
  misc_feature 1..17: note = Synthetic: BCOR forward primer
  source 1..17: mol_type = other DNA
gagcgcccacagggaca

SEQ ID NO: 3166 - DNA, 17 bp, synthetic construct
  misc_feature 1..17: note = Synthetic: BCOR reverse primer
  source 1..17: mol_type = other DNA
tgccgccggaagcacgg

SEQ ID NO: 3167 - DNA, 23 bp, synthetic construct
  misc_feature 1..23: note = Synthetic: BCOR forward primer
  source 1..23: mol_type = other DNA
cgccagcgttcttattgacaata

SEQ ID NO: 3168 - DNA, 20 bp, synthetic construct
  misc_feature 1..20: note = Synthetic: BCOR reverse primer
  source 1..20: mol_type = other DNA
cagctgccatgctcaagttc

SEQ ID NO: 3169 - DNA, 23 bp, synthetic construct
  misc_feature 1..23: note = Synthetic: BCL9L forward primer
  source 1..23: mol_type = other DNA
taggctctgtgtctgtgaaatca

SEQ ID NO: 3170 - DNA, 17 bp, synthetic construct
  misc_feature 1..17: note = Synthetic: BCL9L reverse primer
  source 1..17: mol_type = other DNA
gaggagcgggtgagggg

SEQ ID NO: 3171 - DNA, 17 bp, synthetic construct
  misc_feature 1..17: note = Synthetic: BCL9L forward primer
  source 1..17: mol_type = other DNA
ggggcttgtgctggtgg

SEQ ID NO: 3172 - DNA, 17 bp, synthetic construct
  misc_feature 1..17: note = Synthetic: BCL9L reverse primer
  source 1..17: mol_type = other DNA
atcgggaacggtccctc

SEQ ID NO: 3173 - DNA, 17 bp, synthetic construct
  misc_feature 1..17: note = Synthetic: BCL2 forward primer
  source 1..17: mol_type = other DNA
ctgcagcggcgaggtcc

SEQ ID NO: 3174 - DNA, 19 bp, synthetic construct
  misc_feature 1..19: note = Synthetic: BCL2 reverse primer
  source 1..19: mol_type = other DNA
gggcatcttctcctcccag

SEQ ID NO: 3175 - DNA, 17 bp, synthetic construct
  misc_feature 1..17: note = Synthetic: BCL2 forward primer
  source 1..17: mol_type = other DNA
ggatggggcgtgtgccc

SEQ ID NO: 3176 - DNA, 18 bp, synthetic construct
  misc_feature 1..18: note = Synthetic: BCL2 reverse primer
  source 1..18: mol_type = other DNA
tgtcgcagaggggctacg

SEQ ID NO: 3177 - DNA, 19 bp, synthetic construct
  misc_feature 1..19: note = Synthetic: BCL2 forward primer
  source 1..19: mol_type = other DNA
catctcccgcatcccactc

SEQ ID NO: 3178 - DNA, 23 bp, synthetic construct
  misc_feature 1..23: note = Synthetic: BCL2 reverse primer
  source 1..23: mol_type = other DNA
ggtacgataaccgggagatagtg

SEQ ID NO: 3179 - DNA, 26 bp, synthetic construct
  misc_feature 1..26: note = Synthetic: BCHE forward primer
  source 1..26: mol_type = other DNA
aaaatttcctcggcttttgtgtaatt

SEQ ID NO: 3180 - DNA, 20 bp, synthetic construct
  misc_feature 1..20: note = Synthetic: BCHE reverse primer
  source 1..20: mol_type = other DNA
atcctccaaacttccgtggc

SEQ ID NO: 3181 - DNA, 22 bp, synthetic construct
  misc_feature 1..22: note = Synthetic: BCHE forward primer
  source 1..22: mol_type = other DNA
atgcatcactcccatccattct

SEQ ID NO: 3182 - DNA, 24 bp, synthetic construct
  misc_feature 1..24: note = Synthetic: BCHE reverse primer
  source 1..24: mol_type = other DNA
aagaagttctcagaatggggaaat

SEQ ID NO: 3183 - DNA, 22 bp, synthetic construct
  misc_feature 1..22: note = Synthetic: BAX forward primer
  source 1..22: mol_type = other DNA
gggtgagtttgaggtctgatta

SEQ ID NO: 3184 - DNA, 17 bp, synthetic construct
  misc_feature 1..17: note = Synthetic: BAX reverse primer
  source 1..17: mol_type = other DNA
ccagctcgggtgcctcc

SEQ ID NO: 3185 - DNA, 18 bp, synthetic construct
  misc_feature 1..18: note = Synthetic: BAX forward primer
  source 1..18: mol_type = other DNA
atcgagcagggcgaatgg

SEQ ID NO: 3186 - DNA, 19 bp, synthetic construct
  misc_feature 1..19: note = Synthetic: BAX reverse primer
  source 1..19: mol_type = other DNA
ggtggacgcatcctgaggc

SEQ ID NO: 3187 - DNA, 25 bp, synthetic construct
  misc_feature 1..25: note = Synthetic: BAI3 forward primer
  source 1..25: mol_type = other DNA
tgctctgttcttttgaccatcacag

SEQ ID NO: 3188 - DNA, 21 bp, synthetic construct
  misc_feature 1..21: note = Synthetic: BAI3 reverse primer
  source 1..21: mol_type = other DNA
ctgggacattccatcacctgc

SEQ ID NO: 3189 - DNA, 19 bp, synthetic construct
  misc_feature 1..19: note = Synthetic: BAI3 forward primer
  source 1..19: mol_type = other DNA
gctaaggggcagcgaatgc

SEQ ID NO: 3190 - DNA, 24 bp, synthetic construct
  misc_feature 1..24: note = Synthetic: BAI3 reverse primer
  source 1..24: mol_type = other DNA
atcagaagatcgcctgcatagaaa

SEQ ID NO: 3191 - DNA, 21 bp, synthetic construct
  misc_feature 1..21: note = Synthetic: BAI3 forward primer
  source 1..21: mol_type = other DNA
ggtgaccaagacactgttgga

SEQ ID NO: 3192 - DNA, 24 bp, synthetic construct
  misc_feature 1..24: note = Synthetic: BAI3 reverse primer
  source 1..24: mol_type = other DNA
acatttctcaggatctccacagac

SEQ ID NO: 3193 - DNA, 24 bp, synthetic construct
  misc_feature 1..24: note = Synthetic: BAI3 forward primer
  source 1..24: mol_type = other DNA
cactttttcttcctggcttcattc

SEQ ID NO: 3194 - DNA, 25 bp, synthetic construct
  misc_feature 1..25: note = Synthetic: BAI3 reverse primer
  source 1..25: mol_type = other DNA
cgtgtcctaatttttccagttacag

SEQ ID NO: 3195 - DNA, 20 bp, synthetic construct
  misc_feature 1..20: note = Synthetic: BAI3 forward primer
  source 1..20: mol_type = other DNA
ttgactgaggcgtggcaatc

SEQ ID NO: 3196 - DNA, 22 bp, synthetic construct
  misc_feature 1..22: note = Synthetic: BAI3 reverse primer
  source 1..22: mol_type = other DNA
tccaaggcacaaaaagcgtttt

SEQ ID NO: 3197 - DNA, 23 bp, synthetic construct
  misc_feature 1..23: note = Synthetic: BAI3 forward primer
  source 1..23: mol_type = other DNA
agtcagatgagtgagcctcatag

SEQ ID NO: 3198 - DNA, 20 bp, synthetic construct
  misc_feature 1..20: note = Synthetic: BAI3 reverse primer
  source 1..20: mol_type = other DNA
ggtggctgacaaagctgttg

SEQ ID NO: 3199 - DNA, 21 bp, synthetic construct
  misc_feature 1..21: note = Synthetic: BAI3 forward primer
  source 1..21: mol_type = other DNA
ctcaaatgtgccaagtgtgga

SEQ ID NO: 3200 - DNA, 24 bp, synthetic construct
  misc_feature 1..24: note = Synthetic: BAI3 reverse primer
  source 1..24: mol_type = other DNA
attgggactaacatggcgttactg

SEQ ID NO: 3201 - DNA, 23 bp, synthetic construct
  misc_feature 1..23: note = Synthetic: BAI3 forward primer
  source 1..23: mol_type = other DNA
ggtgtgatgtatagctacgtaat

SEQ ID NO: 3202 - DNA, 20 bp, synthetic construct
  misc_feature 1..20: note = Synthetic: BAI3 reverse primer
  source 1..20: mol_type = other DNA
aaagccagaaggggcaacac

SEQ ID NO: 3203 - DNA, 22 bp, synthetic construct
  misc_feature 1..22: note = Synthetic: BAI3 forward primer
  source 1..22: mol_type = other DNA
ctctttggagctcctgtgtggt

SEQ ID NO: 3204 - DNA, 22 bp, synthetic construct
  misc_feature 1..22: note = Synthetic: BAI3 reverse primer
  source 1..22: mol_type = other DNA
atctgtcatggccagaaccgca

SEQ ID NO: 3205 - DNA, 24 bp, synthetic construct
  misc_feature 1..24: note = Synthetic: BAI3 forward primer
  source 1..24: mol_type = other DNA
acaggttcaggatgcatttagatg

SEQ ID NO: 3206 - DNA, 22 bp, synthetic construct
  misc_feature 1..22: note = Synthetic: BAI3 reverse primer
  source 1..22: mol_type = other DNA
agcatgcccattaggaaacgaa

SEQ ID NO: 3207 - DNA, 24 bp, synthetic construct
  misc_feature 1..24: note = Synthetic: BAI3 forward primer
  source 1..24: mol_type = other DNA
gagaaactgtcaggatcccatcaa

SEQ ID NO: 3208 - DNA, 32 bp, synthetic construct
  misc_feature 1..32: note = Synthetic: BAI3 reverse primer
  source 1..32: mol_type = other DNA
cttgagaaatcatgagttaattaacaatcggg

SEQ ID NO: 3209 - DNA, 23 bp, synthetic construct
  misc_feature 1..23: note = Synthetic: BAI3 forward primer
  source 1..23: mol_type = other DNA
aaggggaagaagatcagaaatct

SEQ ID NO: 3210 - DNA, 28 bp, synthetic construct
  misc_feature 1..28: note = Synthetic: BAI3 reverse primer
  source 1..28: mol_type = other DNA
ttctcccattttctgattttaagcagct

SEQ ID NO: 3211 - DNA, 27 bp, synthetic construct
  misc_feature 1..27: note = Synthetic: BAI3 forward primer
  source 1..27: mol_type = other DNA
cagtttggttgccatgtattatgtact

SEQ ID NO: 3212 - DNA, 24 bp, synthetic construct
  misc_feature 1..24: note = Synthetic: BAI3 reverse primer
  source 1..24: mol_type = other DNA
gggcaggtgcattttgtatacatg

SEQ ID NO: 3213 - DNA, 23 bp, synthetic construct
  misc_feature 1..23: note = Synthetic: B4GALNT1 forward primer
  source 1..23: mol_type = other DNA
ggtcaatagctcggacttgtttc

SEQ ID NO: 3214 - DNA, 20 bp, synthetic construct
  misc_feature 1..20: note = Synthetic: B4GALNT1 reverse primer
  source 1..20: mol_type = other DNA
tgctggcttggaacaactgc

SEQ ID NO: 3215 - DNA, 19 bp, synthetic construct
  misc_feature 1..19: note = Synthetic: B4GALNT1 forward primer
  source 1..19: mol_type = other DNA
cactggactcacaactgca

SEQ ID NO: 3216 - DNA, 23 bp, synthetic construct
  misc_feature 1..23: note = Synthetic: B4GALNT1 reverse primer
  source 1..23: mol_type = other DNA
tgatgaccctcactacctacccc

SEQ ID NO: 3217 - DNA, 24 bp, synthetic construct
  misc_feature 1..24: note = Synthetic: B2M forward primer
  source 1..24: mol_type = other DNA
ctgggcacgcgtttaatataagtg

SEQ ID NO: 3218 - DNA, 19 bp, synthetic construct
  misc_feature 1..19: note = Synthetic: B2M reverse primer
  source 1..19: mol_type = other DNA
ctccaggccagaaagagag

SEQ ID NO: 3219 - DNA, 19 bp, synthetic construct
  misc_feature 1..19: note = Synthetic: B2M forward primer
  source 1..19: mol_type = other DNA
gagatgtctcgctccgtgg

SEQ ID NO: 3220 - DNA, 19 bp, synthetic construct
  misc_feature 1..19: note = Synthetic: B2M reverse primer
  source 1..19: mol_type = other DNA
gagactcacgctggatagc

SEQ ID NO: 3221 - DNA, 18 bp, synthetic construct
  misc_feature 1..18: note = Synthetic: AXIN2 forward primer
  source 1..18: mol_type = other DNA
tcctgggtgaacaggtgg

SEQ ID NO: 3222 - DNA, 21 bp, synthetic construct
  misc_feature 1..21: note = Synthetic: AXIN2 reverse primer
  source 1..21: mol_type = other DNA
aaaggcctaccccttggagtc

SEQ ID NO: 3223 - DNA, 19 bp, synthetic construct
  misc_feature 1..19: note = Synthetic: ATXN2L forward primer
  source 1..19: mol_type = other DNA
aggcccatgtccaaactgg

SEQ ID NO: 3224 - DNA, 19 bp, synthetic construct
  misc_feature 1..19: note = Synthetic: ATXN2L reverse primer
  source 1..19: mol_type = other DNA
tgactctggggtgggtgca

SEQ ID NO: 3225 - DNA, 17 bp, synthetic construct
  misc_feature 1..17: note = Synthetic: ATXN2L forward primer
  source 1..17: mol_type = other DNA
cccaggtgatgctgctg

SEQ ID NO: 3226 - DNA, 20 bp, synthetic construct
  misc_feature 1..20: note = Synthetic: ATXN2L reverse primer
  source 1..20: mol_type = other DNA
ggtgtggaagctgagagtgc

SEQ ID NO: 3227 - DNA, 29 bp, synthetic construct
  misc_feature 1..29: note = Synthetic: ATM forward primer
  source 1..29: mol_type = other DNA
gaagtagaggaaagtattcttcaggattt

SEQ ID NO: 3228 - DNA, 27 bp, synthetic construct
  misc_feature 1..27: note = Synthetic: ATM reverse primer
  source 1..27: mol_type = other DNA
gtgacagatatctgccatcaattcaat

SEQ ID NO: 3229 - DNA, 26 bp, synthetic construct
  misc_feature 1..26: note = Synthetic: ATM forward primer
  source 1..26: mol_type = other DNA
agctcttactatcttcctcaagactt

SEQ ID NO: 3230 - DNA, 28 bp, synthetic construct
  misc_feature 1..28: note = Synthetic: ATM reverse primer
  source 1..28: mol_type = other DNA
gaatcattaagcctatgttgagtccaaa

SEQ ID NO: 3231 - DNA, 23 bp, synthetic construct
  misc_feature 1..23: note = Synthetic: ASXL3 forward primer
  source 1..23: mol_type = other DNA
gaaatgcagttgcggataaggca

SEQ ID NO: 3232 - DNA, 32 bp, synthetic construct
  misc_feature 1..32: note = Synthetic: ASXL3 reverse primer
  source 1..32: mol_type = other DNA
acttacttttctccataaaacctctcaaagaa

SEQ ID NO: 3233 - DNA, 27 bp, synthetic construct
  misc_feature 1..27: note = Synthetic: ASXL3 forward primer
  source 1..27: mol_type = other DNA
aaagaaaacagaaccttggaaagaaaa

SEQ ID NO: 3234 - DNA, 27 bp, synthetic construct
  misc_feature 1..27: note = Synthetic: ASXL3 reverse primer
  source 1..27: mol_type = other DNA
agcatatgagtgtgctatgtgaagcag

SEQ ID NO: 3235 - DNA, 22 bp, synthetic construct
  misc_feature 1..22: note = Synthetic: ASXL1 forward primer
  source 1..22: mol_type = other DNA
gaccctcgcagacattaaagcc

SEQ ID NO: 3236 - DNA, 18 bp, synthetic construct
  misc_feature 1..18: note = Synthetic: ASXL1 reverse primer
  source 1..18: mol_type = other DNA
gccacctccctcatcggt

SEQ ID NO: 3237 - DNA, 25 bp, synthetic construct
  misc_feature 1..25: note = Synthetic: ASTN2 forward primer
  source 1..25: mol_type = other DNA
ttctacaaactctggttctggaacc

SEQ ID NO: 3238 - DNA, 26 bp, synthetic construct
  misc_feature 1..26: note = Synthetic: ASTN2 reverse primer
  source 1..26: mol_type = other DNA
gatgaaactcagctgacattctacac

SEQ ID NO: 3239 - DNA, 17 bp, synthetic construct
  misc_feature 1..17: note = Synthetic: ASTN2 forward primer
  source 1..17: mol_type = other DNA
cgactgcggtactgctc

SEQ ID NO: 3240 - DNA, 27 bp, synthetic construct
  misc_feature 1..27: note = Synthetic: ASTN2 reverse primer
  source 1..27: mol_type = other DNA
agactaactgatagactgtgcttactc

SEQ ID NO: 3241 - DNA, 20 bp, synthetic construct
  misc_feature 1..20: note = Synthetic: ASTN2 forward primer
  source 1..20: mol_type = other DNA
agcagcacagatgggatgta

SEQ ID NO: 3242 - DNA, 18 bp, synthetic construct
  misc_feature 1..18: note = Synthetic: ASTN2 reverse primer
  source 1..18: mol_type = other DNA
gcgacgttggcagaagcg

SEQ ID NO: 3243 - DNA, 18 bp, synthetic construct
  misc_feature 1..18: note = Synthetic: ASTN2 forward primer
  source 1..18: mol_type = other DNA
gctcttctgggggatgcg

SEQ ID NO: 3244 - DNA, 18 bp, synthetic construct
  misc_feature 1..18: note = Synthetic: ASTN2 reverse primer
  source 1..18: mol_type = other DNA
tcaccgtggcgctgtacg

SEQ ID NO: 3245 - DNA, 19 bp, synthetic construct
  misc_feature 1..19: note = Synthetic: ASTN1 forward primer
  source 1..19: mol_type = other DNA
agttgggaggcatggtctg

SEQ ID NO: 3246 - DNA, 17 bp, synthetic construct
  misc_feature 1..17: note = Synthetic: ASTN1 reverse primer
  source 1..17: mol_type = other DNA
gtgcccggcggctcctg

SEQ ID NO: 3247 - DNA, 20 bp, synthetic construct
  misc_feature 1..20: note = Synthetic: ASTN1 forward primer
  source 1..20: mol_type = other DNA
ggggtcacattggtgttcac

SEQ ID NO: 3248 - DNA, 18 bp, synthetic construct
  misc_feature 1..18: note = Synthetic: ASTN1 reverse primer
  source 1..18: mol_type = other DNA
ctgaaccctgcccaagtg

SEQ ID NO: 3249 - DNA, 17 bp, synthetic construct
  misc_feature 1..17: note = Synthetic: ASTN1 forward primer
  source 1..17: mol_type = other DNA
acagctgttcctaccca

SEQ ID NO: 3250 - DNA, 17 bp, synthetic construct
  misc_feature 1..17: note = Synthetic: ASTN1 reverse primer
  source 1..17: mol_type = other DNA
cctcgactccctgcagg

SEQ ID NO: 3251 - DNA, 20 bp, synthetic construct
  misc_feature 1..20: note = Synthetic: ASTN1 forward primer
  source 1..20: mol_type = other DNA
gaggtccatccccgactttt

SEQ ID NO: 3252 - DNA, 20 bp, synthetic construct
  misc_feature 1..20: note = Synthetic: ASTN1 reverse primer
  source 1..20: mol_type = other DNA
gaacggaggggaggactttg

SEQ ID NO: 3253 - DNA, 20 bp, synthetic construct
  misc_feature 1..20: note = Synthetic: ASNA1 forward primer
  source 1..20: mol_type = other DNA
gcgtgagagtgttctgatca

SEQ ID NO: 3254 - DNA, 24 bp, synthetic construct
  misc_feature 1..24: note = Synthetic: ASNA1 reverse primer
  source 1..24: mol_type = other DNA
acctttgagaacttctggtcaaaa

SEQ ID NO: 3255 - DNA, 24 bp, synthetic construct
  misc_feature 1..24: note = Synthetic: ASB5 forward primer
  source 1..24: mol_type = other DNA
cataaagaagcttccagatgcaat

SEQ ID NO: 3256 - DNA, 22 bp, synthetic construct
  misc_feature 1..22: note = Synthetic: ASB5 reverse primer
  source 1..22: mol_type = other DNA
gggcatagatgttgaccaagaa

SEQ ID NO: 3257 - DNA, 23 bp, synthetic construct
  misc_feature 1..23: note = Synthetic: ASB5 forward primer
  source 1..23: mol_type = other DNA
aggagttcccaaatgaggaattt

SEQ ID NO: 3258 - DNA, 21 bp, synthetic construct
  misc_feature 1..21: note = Synthetic: ASB5 reverse primer
  source 1..21: mol_type = other DNA
caggtcaccatgaatgtcttg

SEQ ID NO: 3259 - DNA, 26 bp, synthetic construct
  misc_feature 1..26: note = Synthetic: ASB17 forward primer
  source 1..26: mol_type = other DNA
atgtaatctgtgagtagtgcgtcaaa

SEQ ID NO: 3260 - DNA, 23 bp, synthetic construct
  misc_feature 1..23: note = Synthetic: ASB17 reverse primer
  source 1..23: mol_type = other DNA
gggatatcactgttacgaaccaa

SEQ ID NO: 3261 - DNA, 26 bp, synthetic construct
  misc_feature 1..26: note = Synthetic: ASB17 forward primer
  source 1..26: mol_type = other DNA
ctcagaatttttgccagtgatctgta

SEQ ID NO: 3262 - DNA, 27 bp, synthetic construct
  misc_feature 1..27: note = Synthetic: ASB17 reverse primer
  source 1..27: mol_type = other DNA
taaaagaccctccctacagtttttggg

SEQ ID NO: 3263 - DNA, 21 bp, synthetic construct
  misc_feature 1..21: note = Synthetic: ARID1A forward primer
  source 1..21: mol_type = other DNA
gcaggagtttgacagtggcct

SEQ ID NO: 3264 - DNA, 21 bp, synthetic construct
  misc_feature 1..21: note = Synthetic: ARID1A reverse primer
  source 1..21: mol_type = other DNA
ctgtcttgctctcgaagtggg

SEQ ID NO: 3265 - DNA, 22 bp, synthetic construct
  misc_feature 1..22: note = Synthetic: ARID1A forward primer
  source 1..22: mol_type = other DNA
ttctggactggcaggattctct

SEQ ID NO: 3266 - DNA, 21 bp, synthetic construct
  misc_feature 1..21: note = Synthetic: ARID1A reverse primer
  source 1..21: mol_type = other DNA
caaagtcattgcctggcacaa

SEQ ID NO: 3267 - DNA, 23 bp, synthetic construct
  misc_feature 1..23: note = Synthetic: ARID1A forward primer
  source 1..23: mol_type = other DNA
acaacaatgtggacctgattctg

SEQ ID NO: 3268 - DNA, 20 bp, synthetic construct
  misc_feature 1..20: note = Synthetic: ARID1A reverse primer
  source 1..20: mol_type = other DNA
tgaggaagcgcaccatagtg

SEQ ID NO: 3269 - DNA, 22 bp, synthetic construct
  misc_feature 1..22: note = Synthetic: ARID1A forward primer
  source 1..22: mol_type = other DNA
gcctggagaagttgtatagcac

SEQ ID NO: 3270 - DNA, 20 bp, synthetic construct
  misc_feature 1..20: note = Synthetic: ARID1A reverse primer
  source 1..20: mol_type = other DNA
cagtaccacagccatctccc

SEQ ID NO: 3271 - DNA, 20 bp, synthetic construct
  misc_feature 1..20: note = Synthetic: ARHGEF40 forward primer
  source 1..20: mol_type = other DNA
gtacccctcggagaacaggc

SEQ ID NO: 3272 - DNA, 18 bp, synthetic construct
  misc_feature 1..18: note = Synthetic: ARHGEF40 reverse primer
  source 1..18: mol_type = other DNA
tcccctcctcggctaaga

SEQ ID NO: 3273 - DNA, 24 bp, synthetic construct
  misc_feature 1..24: note = Synthetic: ARHGEF40 forward primer
  source 1..24: mol_type = other DNA
gaaacagaagaaagaagcgagctg

SEQ ID NO: 3274 - DNA, 20 bp, synthetic construct
  misc_feature 1..20: note = Synthetic: ARHGEF40 reverse primer
  source 1..20: mol_type = other DNA
ggctggcatcttccttgtcc

SEQ ID NO: 3275 - DNA, 28 bp, synthetic construct
  misc_feature 1..28: note = Synthetic: APOB forward primer
  source 1..28: mol_type = other DNA
atggaatgcctgtgtttgtttttcttat

SEQ ID NO: 3276 - DNA, 26 bp, synthetic construct
  misc_feature 1..26: note = Synthetic: APOB reverse primer
  source 1..26: mol_type = other DNA
caataatcacaactcctccactgaaa

SEQ ID NO: 3277 - DNA, 23 bp, synthetic construct
  misc_feature 1..23: note = Synthetic: APCS forward primer
  source 1..23: mol_type = other DNA
gggagtcctcatcaggtattgct

SEQ ID NO: 3278 - DNA, 24 bp, synthetic construct
  misc_feature 1..24: note = Synthetic: APCS reverse primer
  source 1..24: mol_type = other DNA
ctgagcttctacaaagtaaccctg

SEQ ID NO: 3279 - DNA, 21 bp, synthetic construct
  misc_feature 1..21: note = Synthetic: APCS forward primer
  source 1..21: mol_type = other DNA
gtgaaaaagggtctgcgacag

SEQ ID NO: 3280 - DNA, 23 bp, synthetic construct
  misc_feature 1..23: note = Synthetic: APCS reverse primer
  source 1..23: mol_type = other DNA
tcaaacttgcccccataggaatc

SEQ ID NO: 3281 - DNA, 29 bp, synthetic construct
  misc_feature 1..29: note = Synthetic: APC forward primer
  source 1..29: mol_type = other DNA
cttactaatgaccactacagtattacact

SEQ ID NO: 3282 - DNA, 26 bp, synthetic construct
  misc_feature 1..26: note = Synthetic: APC reverse primer
  source 1..26: mol_type = other DNA
tacatctccaaaagtcaagtttgtca

SEQ ID NO: 3283 - DNA, 23 bp, synthetic construct
  misc_feature 1..23: note = Synthetic: APC forward primer
  source 1..23: mol_type = other DNA
aatttgtcttggcgagcagatgt

SEQ ID NO: 3284 - DNA, 24 bp, synthetic construct
  misc_feature 1..24: note = Synthetic: APC reverse primer
  source 1..24: mol_type = other DNA
acattccatcaatgctttcacact

SEQ ID NO: 3285 - DNA, 22 bp, synthetic construct
  misc_feature 1..22: note = Synthetic: APC forward primer
  source 1..22: mol_type = other DNA
tctaggcaactaccatccagca

SEQ ID NO: 3286 - DNA, 19 bp, synthetic construct
  misc_feature 1..19: note = Synthetic: APC reverse primer
  source 1..19: mol_type = other DNA
ggcaatctgggctgcagtg

SEQ ID NO: 3287 - DNA, 26 bp, synthetic construct
  misc_feature 1..26: note = Synthetic: APC forward primer
  source 1..26: mol_type = other DNA
atacctctcaggaagacagaagttct

SEQ ID NO: 3288 - DNA, 30 bp, synthetic construct
  misc_feature 1..30: note = Synthetic: APC reverse primer
  source 1..30: mol_type = other DNA
tcctatttgaattttccgacttagtgaaat

SEQ ID NO: 3289 - DNA, 25 bp, synthetic construct
  misc_feature 1..25: note = Synthetic: APC forward primer
  source 1..25: mol_type = other DNA
gaaatgcacttagaagaagctctgc

SEQ ID NO: 3290 - DNA, 32 bp, synthetic construct
  misc_feature 1..32: note = Synthetic: APC reverse primer
  source 1..32: mol_type = other DNA
gatctcttgtattctaatttggcataaggcat

SEQ ID NO: 3291 - DNA, 26 bp, synthetic construct
  misc_feature 1..26: note = Synthetic: APC forward primer
  source 1..26: mol_type = other DNA
cactgatgataaacacctcaagttcc

SEQ ID NO: 3292 - DNA, 21 bp, synthetic construct
  misc_feature 1..21: note = Synthetic: APC reverse primer
  source 1..21: mol_type = other DNA
ccgtgacctgtatggagaaac

SEQ ID NO: 3293 - DNA, 22 bp, synthetic construct
  misc_feature 1..22: note = Synthetic: APC forward primer
  source 1..22: mol_type = other DNA
ggagccaatggttcagaaacaa

SEQ ID NO: 3294 - DNA, 25 bp, synthetic construct
  misc_feature 1..25: note = Synthetic: APC reverse primer
  source 1..25: mol_type = other DNA
ttcttgacacaaagactggcttaca

SEQ ID NO: 3295 - DNA, 34 bp, synthetic construct
  misc_feature 1..34: note = Synthetic: APC forward primer
  source 1..34: mol_type = other DNA
tctattaaccaagaaacaatacagacttattgtg

SEQ ID NO: 3296 - DNA, 22 bp, synthetic construct
  misc_feature 1..22: note = Synthetic: APC reverse primer
  source 1..22: mol_type = other DNA
aatctgcttcctgtgtcgtctg

SEQ ID NO: 3297 - DNA, 29 bp, synthetic construct
  misc_feature 1..29: note = Synthetic: APC forward primer
  source 1..29: mol_type = other DNA
catcagctgaagatgaaataggatgtaat

SEQ ID NO: 3298 - DNA, 21 bp, synthetic construct
  misc_feature 1..21: note = Synthetic: APC reverse primer
  source 1..21: mol_type = other DNA
tgtgacactgctggaacttcg

SEQ ID NO: 3299 - DNA, 23 bp, synthetic construct
  misc_feature 1..23: note = Synthetic: APC forward primer
  source 1..23: mol_type = other DNA
actaggtcagctgaagatcctgt

SEQ ID NO: 3300 - DNA, 24 bp, synthetic construct
  misc_feature 1..24: note = Synthetic: APC reverse primer
  source 1..24: mol_type = other DNA
ctggctgattctgaagataaacta

SEQ ID NO: 3301 - DNA, 19 bp, synthetic construct
  misc_feature 1..19: note = Synthetic: APC forward primer
  source 1..19: mol_type = other DNA
cagcagactgcagggttct

SEQ ID NO: 3302 - DNA, 22 bp, synthetic construct
  misc_feature 1..22: note = Synthetic: APC reverse primer
  source 1..22: mol_type = other DNA
ggggtctcctgaacatagtgtt

SEQ ID NO: 3303 - DNA, 21 bp, synthetic construct
  misc_feature 1..21: note = Synthetic: APC forward primer
  source 1..21: mol_type = other DNA
acacccaaaagtccacctgaa

SEQ ID NO: 3304 - DNA, 20 bp, synthetic construct
  misc_feature 1..20: note = Synthetic: APC reverse primer
  source 1..20: mol_type = other DNA
cggagctggcaatcgaacga

SEQ ID NO: 3305 - DNA, 30 bp, synthetic construct
  misc_feature 1..30: note = Synthetic: APC forward primer
  source 1..30: mol_type = other DNA
acttctgtcagttcacttgatagttttgag

SEQ ID NO: 3306 - DNA, 22 bp, synthetic construct
  misc_feature 1..22: note = Synthetic: APC reverse primer
  source 1..22: mol_type = other DNA
ggtttgtccagggctatctgga

SEQ ID NO: 3307 - DNA, 22 bp, synthetic construct
  misc_feature 1..22: note = Synthetic: APC forward primer
  source 1..22: mol_type = other DNA
gtggcattataagccccagtga

SEQ ID NO: 3308 - DNA, 19 bp, synthetic construct
  misc_feature 1..19: note = Synthetic: APC reverse primer
  source 1..19: mol_type = other DNA
tctcttttcagcagtaggt

SEQ ID NO: 3309 - DNA, 25 bp, synthetic construct
  misc_feature 1..25: note = Synthetic: APC forward primer
  source 1..25: mol_type = other DNA
aaaccaagcgagaagtacctaaaaa

SEQ ID NO: 3310 - DNA, 21 bp, synthetic construct
  misc_feature 1..21: note = Synthetic: APC reverse primer
  source 1..21: mol_type = other DNA
ctctgaactgcagcatttact

SEQ ID NO: 3311 - DNA, 20 bp, synthetic construct
  misc_feature 1..20: note = Synthetic: APC forward primer
  source 1..20: mol_type = other DNA
agtggacctaagcaagctgc

SEQ ID NO: 3312 - DNA, 29 bp, synthetic construct
  misc_feature 1..29: note = Synthetic: APC reverse primer
  source 1..29: mol_type = other DNA
caagaaaatccatctggagtactttccgt

SEQ ID NO: 3313 - DNA, 21 bp, synthetic construct
  misc_feature 1..21: note = Synthetic: APC forward primer
  source 1..21: mol_type = other DNA
ccaggttcttccagatgctga

SEQ ID NO: 3314 - DNA, 19 bp, synthetic construct
  misc_feature 1..19: note = Synthetic: APC reverse primer
  source 1..19: mol_type = other DNA
agagcactcaggctggatg

SEQ ID NO: 3315 - DNA, 26 bp, synthetic construct
  misc_feature 1..26: note = Synthetic: APC forward primer
  source 1..26: mol_type = other DNA
aatcagagcagcctaaagaatcaaat

SEQ ID NO: 3316 - DNA, 29 bp, synthetic construct
  misc_feature 1..29: note = Synthetic: APC reverse primer
  source 1..29: mol_type = other DNA
catggcagaaataatacattcttctagta

SEQ ID NO: 3317 - DNA, 31 bp, synthetic construct
  misc_feature 1..31: note = Synthetic: APC forward primer
  source 1..31: mol_type = other DNA
tctgaaaaggacctattagatgattcagatg

SEQ ID NO: 3318 - DNA, 20 bp, synthetic construct
  misc_feature 1..20: note = Synthetic: APC reverse primer
  source 1..20: mol_type = other DNA
gtctgggctggcttttttgc

SEQ ID NO: 3319 - DNA, 25 bp, synthetic construct
  misc_feature 1..25: note = Synthetic: APC forward primer
  source 1..25: mol_type = other DNA
gatatgaccagaaggcaattggaat

SEQ ID NO: 3320 - DNA, 25 bp, synthetic construct
  misc_feature 1..25: note = Synthetic: APC reverse primer
  source 1..25: mol_type = other DNA
aacaagtaacttacctgtgctcgtt

SEQ ID NO: 3321 - DNA, 23 bp, synthetic construct
  misc_feature 1..23: note = Synthetic: APC forward primer
  source 1..23: mol_type = other DNA
aactaggtacctgccaggatatg

SEQ ID NO: 3322 - DNA, 33 bp, synthetic construct
  misc_feature 1..33: note = Synthetic: APC reverse primer
  source 1..33: mol_type = other DNA
cagagctgtaattcattttattcctaatagctc

SEQ ID NO: 3323 - DNA, 34 bp, synthetic construct
  misc_feature 1..34: note = Synthetic: APC forward primer
  source 1..34: mol_type = other DNA
aagtggtagccatagtatgattatttctattaat

SEQ ID NO: 3324 - DNA, 26 bp, synthetic construct
  misc_feature 1..26: note = Synthetic: APC reverse primer
  source 1..26: mol_type = other DNA
ctgtaaaagctgtcgtatacgaagta

SEQ ID NO: 3325 - DNA, 24 bp, synthetic construct
  misc_feature 1..24: note = Synthetic: APC forward primer
  source 1..24: mol_type = other DNA
cgaagaatagccagaattcagcaa

SEQ ID NO: 3326 - DNA, 26 bp, synthetic construct
  misc_feature 1..26: note = Synthetic: APC reverse primer
  source 1..26: mol_type = other DNA
ccacaaacaagaaaggcaatttacta

SEQ ID NO: 3327 - DNA, 28 bp, synthetic construct
  misc_feature 1..28: note = Synthetic: APC forward primer
  source 1..28: mol_type = other DNA
acttcatttggagtaccttaacatgatg

SEQ ID NO: 3328 - DNA, 19 bp, synthetic construct
  misc_feature 1..19: note = Synthetic: APC reverse primer
  source 1..19: mol_type = other DNA
tgtgctactagaactcaaa

SEQ ID NO: 3329 - DNA, 21 bp, synthetic construct
  misc_feature 1..21: note = Synthetic: APC forward primer
  source 1..21: mol_type = other DNA
ggaccatgaaacagccagtgt

SEQ ID NO: 3330 - DNA, 24 bp, synthetic construct
  misc_feature 1..24: note = Synthetic: APC reverse primer
  source 1..24: mol_type = other DNA
ttctgttaccttggttcccagatg

SEQ ID NO: 3331 - DNA, 17 bp, synthetic construct
  misc_feature 1..17: note = Synthetic: AOC1 forward primer
  source 1..17: mol_type = other DNA
cgcttcaggctggaggg

SEQ ID NO: 3332 - DNA, 18 bp, synthetic construct
  misc_feature 1..18: note = Synthetic: AOC1 reverse primer
  source 1..18: mol_type = other DNA
cgttcaggacctgcagcc

SEQ ID NO: 3333 - DNA, 31 bp, synthetic construct
  misc_feature 1..31: note = Synthetic: ANO3 forward primer
  source 1..31: mol_type = other DNA
tgaaacaggtatcacaagaattaaaactttt

SEQ ID NO: 3334 - DNA, 23 bp, synthetic construct
  misc_feature 1..23: note = Synthetic: ANO3 reverse primer
  source 1..23: mol_type = other DNA
ccgagacggttttaacgaagttt

SEQ ID NO: 3335 - DNA, 28 bp, synthetic construct
  misc_feature 1..28: note = Synthetic: ANO3 forward primer
  source 1..28: mol_type = other DNA
aggtatgaatataagcaagagtgagata

SEQ ID NO: 3336 - DNA, 24 bp, synthetic construct
  misc_feature 1..24: note = Synthetic: ANO3 reverse primer
  source 1..24: mol_type = other DNA
tggctcaagctctttgagtaagcg

SEQ ID NO: 3337 - DNA, 29 bp, synthetic construct
  misc_feature 1..29: note = Synthetic: ANKRD12 forward primer
  source 1..29: mol_type = other DNA
aaggacattgagaagatggaaagaaaaac

SEQ ID NO: 3338 - DNA, 26 bp, synthetic construct
  misc_feature 1..26: note = Synthetic: ANKRD12 reverse primer
  source 1..26: mol_type = other DNA
gatgcgaatatagcttgtccttttct

SEQ ID NO: 3339 - DNA, 20 bp, synthetic construct
  misc_feature 1..20: note = Synthetic: ANK2 forward primer
  source 1..20: mol_type = other DNA
gagacttcccacagtacttt

SEQ ID NO: 3340 - DNA, 17 bp, synthetic construct
  misc_feature 1..17: note = Synthetic: ANK2 reverse primer
  source 1..17: mol_type = other DNA
tgagtgccccctctggg

SEQ ID NO: 3341 - DNA, 17 bp, synthetic construct
  misc_feature 1..17: note = Synthetic: ANK2 forward primer
  source 1..17: mol_type = other DNA
gtgcaggccgtcttccc

SEQ ID NO: 3342 - DNA, 24 bp, synthetic construct
  misc_feature 1..24: note = Synthetic: ANK2 reverse primer
  source 1..24: mol_type = other DNA
gcatctaacatgggcatacctgca

SEQ ID NO: 3343 - DNA, 26 bp, synthetic construct
  misc_feature 1..26: note = Synthetic: AMPD1 forward primer
  source 1..26: mol_type = other DNA
tatcatgaatgctgtcatgagatggg

SEQ ID NO: 3344 - DNA, 19 bp, synthetic construct
  misc_feature 1..19: note = Synthetic: AMPD1 reverse primer
  source 1..19: mol_type = other DNA
gggaacgaggcatgaatac

SEQ ID NO: 3345 - DNA, 22 bp, synthetic construct
  misc_feature 1..22: note = Synthetic: AMPD1 forward primer
  source 1..22: mol_type = other DNA
agtgaggtcggaacagaaacgt

SEQ ID NO: 3346 - DNA, 23 bp, synthetic construct
  misc_feature 1..23: note = Synthetic: AMPD1 reverse primer
  source 1..23: mol_type = other DNA
agaacctgcgattccaatagcag

SEQ ID NO: 3347 - DNA, 24 bp, synthetic construct
  misc_feature 1..24: note = Synthetic: ALDH9A1 forward primer
  source 1..24: mol_type = other DNA
gagcaatgtctgagttctggaagg

SEQ ID NO: 3348 - DNA, 31 bp, synthetic construct
  misc_feature 1..31: note = Synthetic: ALDH9A1 reverse primer
  source 1..31: mol_type = other DNA
tcaaaatgcaaaggctgcttttaaaatatgg

SEQ ID NO: 3349 - DNA, 22 bp, synthetic construct
  misc_feature 1..22: note = Synthetic: ALDH9A1 forward primer
  source 1..22: mol_type = other DNA
tccatgccagatttttgactcc

SEQ ID NO: 3350 - DNA, 25 bp, synthetic construct
  misc_feature 1..25: note = Synthetic: ALDH9A1 reverse primer
  source 1..25: mol_type = other DNA
gagtgatagctactttcacatgttc

SEQ ID NO: 3351 - DNA, 29 bp, synthetic construct
  misc_feature 1..29: note = Synthetic: ALB forward primer
  source 1..29: mol_type = other DNA
ggggagaatgtcgattacaattatttctg

SEQ ID NO: 3352 - DNA, 22 bp, synthetic construct
  misc_feature 1..22: note = Synthetic: ALB reverse primer
  source 1..22: mol_type = other DNA
agttccggggcataaaagtaag

SEQ ID NO: 3353 - DNA, 20 bp, synthetic construct
  misc_feature 1..20: note = Synthetic: AKT1 forward primer
  source 1..20: mol_type = other DNA
gccaatgaaggtgccatcat

SEQ ID NO: 3354 - DNA, 20 bp, synthetic construct
  misc_feature 1..20: note = Synthetic: AKT1 reverse primer
  source 1..20: mol_type = other DNA
agagtgtgcgtggctctcac

SEQ ID NO: 3355 - DNA, 24 bp, synthetic construct
  misc_feature 1..24: note = Synthetic: AKAP3 forward primer
  source 1..24: mol_type = other DNA
tcttttcacagccgagacaaactg

SEQ ID NO: 3356 - DNA, 22 bp, synthetic construct
  misc_feature 1..22: note = Synthetic: AKAP3 reverse primer
  source 1..22: mol_type = other DNA
aaagaggtggtctcggatctca

SEQ ID NO: 3357 - DNA, 23 bp, synthetic construct
  misc_feature 1..23: note = Synthetic: AKAP3 forward primer
  source 1..23: mol_type = other DNA
attcctcaagaaggagtcgatga

SEQ ID NO: 3358 - DNA, 22 bp, synthetic construct
  misc_feature 1..22: note = Synthetic: AKAP3 reverse primer
  source 1..22: mol_type = other DNA
ttgccaccatcctactgaagaa

SEQ ID NO: 3359 - DNA, 23 bp, synthetic construct
  misc_feature 1..23: note = Synthetic: AK9 forward primer
  source 1..23: mol_type = other DNA
aacagagtgagaccctgttttga

SEQ ID NO: 3360 - DNA, 29 bp, synthetic construct
  misc_feature 1..29: note = Synthetic: AK9 reverse primer
  source 1..29: mol_type = other DNA
gtctctttctttaacaggttgatacgatt

SEQ ID NO: 3361 - DNA, 25 bp, synthetic construct
  misc_feature 1..25: note = Synthetic: AK9 forward primer
  source 1..25: mol_type = other DNA
ctaatataagttcagcccttctttt

SEQ ID NO: 3362 - DNA, 30 bp, synthetic construct
  misc_feature 1..30: note = Synthetic: AK9 reverse primer
  source 1..30: mol_type = other DNA
aaagccacttttatcattctccattacaat

SEQ ID NO: 3363 - DNA, 30 bp, synthetic construct
  misc_feature 1..30: note = Synthetic: AGTR1 forward primer
  source 1..30: mol_type = other DNA
caatattacagtttgtgctttccattatga

SEQ ID NO: 3364 - DNA, 33 bp, synthetic construct
  misc_feature 1..33: note = Synthetic: AGTR1 reverse primer
  source 1..33: mol_type = other DNA
gtataacttgtaagaatgatcagaaaaggaaac

SEQ ID NO: 3365 - DNA, 21 bp, synthetic construct
  misc_feature 1..21: note = Synthetic: AGTR1 forward primer
  source 1..21: mol_type = other DNA
tgggcctgaccaaaaatatac

SEQ ID NO: 3366 - DNA, 23 bp, synthetic construct
  misc_feature 1..23: note = Synthetic: AGTR1 reverse primer
  source 1..23: mol_type = other DNA
ttctttagggccttccaaataag

SEQ ID NO: 3367 - DNA, 23 bp, synthetic construct
  misc_feature 1..23: note = Synthetic: ADCY2 forward primer
  source 1..23: mol_type = other DNA
tgctttgtttctcaccccaaggg

SEQ ID NO: 3368 - DNA, 19 bp, synthetic construct
  misc_feature 1..19: note = Synthetic: ADCY2 reverse primer
  source 1..19: mol_type = other DNA
ccaggactccaagtaccgg

SEQ ID NO: 3369 - DNA, 17 bp, synthetic construct
  misc_feature 1..17: note = Synthetic: ADCY2 forward primer
  source 1..17: mol_type = other DNA
ggcctcggtccgcatga

SEQ ID NO: 3370 - DNA, 20 bp, synthetic construct
  misc_feature 1..20: note = Synthetic: ADCY2 reverse primer
  source 1..20: mol_type = other DNA
tcatgctgtccctgtgatgt

SEQ ID NO: 3371 - DNA, 23 bp, synthetic construct
  misc_feature 1..23: note = Synthetic: ADCY1 forward primer
  source 1..23: mol_type = other DNA
cacctatcagtgactctcatgtt

SEQ ID NO: 3372 - DNA, 19 bp, synthetic construct
  misc_feature 1..19: note = Synthetic: ADCY1 reverse primer
  source 1..19: mol_type = other DNA
aggacacaggccaccagga

SEQ ID NO: 3373 - DNA, 19 bp, synthetic construct
  misc_feature 1..19: note = Synthetic: ADCY1 forward primer
  source 1..19: mol_type = other DNA
cgtcctgctcctgctagta

SEQ ID NO: 3374 - DNA, 19 bp, synthetic construct
  misc_feature 1..19: note = Synthetic: ADCY1 reverse primer
  source 1..19: mol_type = other DNA
cacaggccacccacatacc

SEQ ID NO: 3375 - DNA, 32 bp, synthetic construct
  misc_feature 1..32: note = Synthetic: ADAMTS20 forward primer
  source 1..32: mol_type = other DNA
agtgttattactgatgactgagaatttacctg

SEQ ID NO: 3376 - DNA, 30 bp, synthetic construct
  misc_feature 1..30: note = Synthetic: ADAMTS20 reverse primer
  source 1..30: mol_type = other DNA
agaactgttattgaatacagtggatcaaat

SEQ ID NO: 3377 - DNA, 34 bp, synthetic construct
  misc_feature 1..34: note = Synthetic: ADAMTS20 forward primer
  source 1..34: mol_type = other DNA
ttgtcgattagtactattaattctttcaactgcg

SEQ ID NO: 3378 - DNA, 22 bp, synthetic construct
  misc_feature 1..22: note = Synthetic: ADAMTS20 reverse primer
  source 1..22: mol_type = other DNA
aaaagaaatcaatgtgcaagga

SEQ ID NO: 3379 - DNA, 22 bp, synthetic construct
  misc_feature 1..22: note = Synthetic: ADAMTS20 forward primer
  source 1..22: mol_type = other DNA
gacagttcttggcattcattgt

SEQ ID NO: 3380 - DNA, 21 bp, synthetic construct
  misc_feature 1..21: note = Synthetic: ADAMTS20 reverse primer
  source 1..21: mol_type = other DNA
tgttccaggagttgtggagga

SEQ ID NO: 3381 - DNA, 32 bp, synthetic construct
  misc_feature 1..32: note = Synthetic: ADAMTS20 forward primer
  source 1..32: mol_type = other DNA
tggccaaagttattcatacaataagattctcg

SEQ ID NO: 3382 - DNA, 24 bp, synthetic construct
  misc_feature 1..24: note = Synthetic: ADAMTS20 reverse primer
  source 1..24: mol_type = other DNA
tttccattagttaccacttttttt

SEQ ID NO: 3383 - DNA, 25 bp, synthetic construct
  misc_feature 1..25: note = Synthetic: ADAMTS12 forward primer
  source 1..25: mol_type = other DNA
agctccttacctgggttaaaaatgg

SEQ ID NO: 3384 - DNA, 20 bp, synthetic construct
  misc_feature 1..20: note = Synthetic: ADAMTS12 reverse primer
  source 1..20: mol_type = other DNA
gcaccaacatttcggcagat

SEQ ID NO: 3385 - DNA, 23 bp, synthetic construct
  misc_feature 1..23: note = Synthetic: ADAMTS12 forward primer
  source 1..23: mol_type = other DNA
gaacagtgtcaaattcactgcac

SEQ ID NO: 3386 - DNA, 24 bp, synthetic construct
  misc_feature 1..24: note = Synthetic: ADAMTS12 reverse primer
  source 1..24: mol_type = other DNA
agaaagaaaacgctatcgcttgtg

SEQ ID NO: 3387 - DNA, 23 bp, synthetic construct
  misc_feature 1..23: note = Synthetic: ADAM19 forward primer
  source 1..23: mol_type = other DNA
tacccattgaaagtggccttaaa

SEQ ID NO: 3388 - DNA, 18 bp, synthetic construct
  misc_feature 1..18: note = Synthetic: ADAM19 reverse primer
  source 1..18: mol_type = other DNA
ggagtcgtccaggaggcc

SEQ ID NO: 3389 - DNA, 18 bp, synthetic construct
  misc_feature 1..18: note = Synthetic: ADAM19 forward primer
  source 1..18: mol_type = other DNA
aattggccggcttggagg

SEQ ID NO: 3390 - DNA, 19 bp, synthetic construct
  misc_feature 1..19: note = Synthetic: ADAM19 reverse primer
  source 1..19: mol_type = other DNA
cccgggtctcaaatagaga

SEQ ID NO: 3391 - DNA, 22 bp, synthetic construct
  misc_feature 1..22: note = Synthetic: ACVR2A forward primer
  source 1..22: mol_type = other DNA
gaaattggccagcatccatctc

SEQ ID NO: 3392 - DNA, 27 bp, synthetic construct
  misc_feature 1..27: note = Synthetic: ACVR2A reverse primer
  source 1..27: mol_type = other DNA
ccaataatctcttaaaacaggcctctt

SEQ ID NO: 3393 - DNA, 27 bp, synthetic construct
  misc_feature 1..27: note = Synthetic: ACVR1B forward primer
  source 1..27: mol_type = other DNA
cagctgccatattacgacttagtgccc

SEQ ID NO: 3394 - DNA, 23 bp, synthetic construct
  misc_feature 1..23: note = Synthetic: ACVR1B reverse primer
  source 1..23: mol_type = other DNA
cataactctgccaccagttgggg

SEQ ID NO: 3395 - DNA, 20 bp, synthetic construct
  misc_feature 1..20: note = Synthetic: ACVR1B forward primer
  source 1..20: mol_type = other DNA
aagctgcgtcccaacatccc

SEQ ID NO: 3396 - DNA, 24 bp, synthetic construct
  misc_feature 1..24: note = Synthetic: ACVR1B reverse primer
  source 1..24: mol_type = other DNA
aggtggagaaatcaggctgatggg

SEQ ID NO: 3397 - DNA, 20 bp, synthetic construct
  misc_feature 1..20: note = Synthetic: ACTRT2 forward primer
  source 1..20: mol_type = other DNA
tggatgaccggcttctcaag

SEQ ID NO: 3398 - DNA, 21 bp, synthetic construct
  misc_feature 1..21: note = Synthetic: ACTRT2 reverse primer
  source 1..21: mol_type = other DNA
tccaatccaggtggagaacca

SEQ ID NO: 3399 - DNA, 19 bp, synthetic construct
  misc_feature 1..19: note = Synthetic: ACTN2 forward primer
  source 1..19: mol_type = other DNA
caagaggatgcccgcctac

SEQ ID NO: 3400 - DNA, 19 bp, synthetic construct
  misc_feature 1..19: note = Synthetic: ACTN2 reverse primer
  source 1..19: mol_type = other DNA
cagatcgctctccccgtag

SEQ ID NO: 3401 - DNA, 20 bp, synthetic construct
  misc_feature 1..20: note = Synthetic: ACTN2 forward primer
  source 1..20: mol_type = other DNA
actggattacgctgcgttct

SEQ ID NO: 3402 - DNA, 26 bp, synthetic construct
  misc_feature 1..26: note = Synthetic: ACTN2 reverse primer
  source 1..26: mol_type = other DNA
gcattctgatgggatgagtgattaca

SEQ ID NO: 3403 - DNA, 19 bp, synthetic construct
  misc_feature 1..19: note = Synthetic: ACE forward primer
  source 1..19: mol_type = other DNA
tggcgctcctggtacaact

SEQ ID NO: 3404 - DNA, 21 bp, synthetic construct
  misc_feature 1..21: note = Synthetic: ACE reverse primer
  source 1..21: mol_type = other DNA
gaggggctctagctgttggta

SEQ ID NO: 3405 - DNA, 20 bp, synthetic construct
  misc_feature 1..20: note = Synthetic: ACE forward primer
  source 1..20: mol_type = other DNA
ggacgatctggaacacctct

SEQ ID NO: 3406 - DNA, 25 bp, synthetic construct
  misc_feature 1..25: note = Synthetic: ACE reverse primer
  source 1..25: mol_type = other DNA
ttgatgtatctgtctccgtatcggc

SEQ ID NO: 3407 - DNA, 26 bp, synthetic construct
  misc_feature 1..26: note = Synthetic: ABCC4 forward primer
  source 1..26: mol_type = other DNA
gagtttccatactcacttgtagattc

SEQ ID NO: 3408 - DNA, 25 bp, synthetic construct
  misc_feature 1..25: note = Synthetic: ABCC4 reverse primer
  source 1..25: mol_type = other DNA
tggttccccttggaatcattttcat

SEQ ID NO: 3409 - DNA, 23 bp, synthetic construct
  misc_feature 1..23: note = Synthetic: ABCC4 forward primer
  source 1..23: mol_type = other DNA
cttcacatctcttgacgtttcca

SEQ ID NO: 3410 - DNA, 23 bp, synthetic construct
  misc_feature 1..23: note = Synthetic: ABCC4 reverse primer
  source 1..23: mol_type = other DNA
gtgattccttggatcgcaatacc

SEQ ID NO: 3411 - DNA, 25 bp, synthetic construct
  misc_feature 1..25: note = Synthetic: ABCC12 forward primer
  source 1..25: mol_type = other DNA
agccaagatcacgagaataaacacc

SEQ ID NO: 3412 - DNA, 23 bp, synthetic construct
  misc_feature 1..23: note = Synthetic: ABCC12 reverse primer
  source 1..23: mol_type = other DNA
tatggacgagctggatgtgaggc

SEQ ID NO: 3413 - DNA, 23 bp, synthetic construct
  misc_feature 1..23: note = Synthetic: ABCC12 forward primer
  source 1..23: mol_type = other DNA
gaaagttctctgcgtgaaacggc

SEQ ID NO: 3414 - DNA, 20 bp, synthetic construct
  misc_feature 1..20: note = Synthetic: ABCC12 reverse primer
  source 1..20: mol_type = other DNA
tcccactggcaggctaatga

SEQ ID NO: 3415 - DNA, 22 bp, synthetic construct
  misc_feature 1..22: note = Synthetic: ABCC10 forward primer
  source 1..22: mol_type = other DNA
cttgggtgatcaatggtctcct

SEQ ID NO: 3416 - DNA, 19 bp, synthetic construct
  misc_feature 1..19: note = Synthetic: ABCC10 reverse primer
  source 1..19: mol_type = other DNA
tagtaggcctgggggttgt

SEQ ID NO: 3417 - DNA, 20 bp, synthetic construct
  misc_feature 1..20: note = Synthetic: ABCC10 forward primer
  source 1..20: mol_type = other DNA
gatccagcttttcctcgacc

SEQ ID NO: 3418 - DNA, 21 bp, synthetic construct
  misc_feature 1..21: note = Synthetic: ABCC10 reverse primer
  source 1..21: mol_type = other DNA
gcccactagcttcccattacc

What is claimed is:

1. A method for detecting circulating tumor nucleic acid (ctTNA) from a liquid biological sample of a patient, comprising the steps of:
a. preparing cell free total nucleic acid (cfTNA) from the sample obtained at one or more timepoints from a patient who had cancer at an initial timepoint,
b. selecting at least 2-45 individualized primer pairs from a primer bank,
wherein the selected individualized primer pairs correspond to at least 2-45 genomic loci of one or more cancer genes, each primer pair is designed to amplify its corresponding genomic locus; wherein said at least individualized 2-45 genomic loci are selected in silico by (i) analyzing sequence data of whole genome, or whole exome, or a large gene panel, or specific cancer genes, of a tumor tissue of the patient, at the initial timepoint by a computational approach, and (ii) choosing at least 2-45 genomic loci containing somatic mutations specific for the patient, based on clonality, detectability, and frequency of the mutation;
wherein the primer bank is designed to comprise multiple primer pairs to amplify different genomic loci of a human, and the primer pairs in the primer banks are designed to be compatible in a single oligonucleotide pool by minimizing primer dimer interaction and reducing amplification of overlapping regions of amplicons by stem-loop inhibition during a PCR reaction;
c. adding the at least 2-45 individualized primer pairs into the cfTNA and perform gene-specific multiplex PCR reaction to amplify the selected genomic loci,
d. purifying, indexing, quantifying, normalizing, and sequencing the amplified DNA, and
e. analyzing the sequencing data and determining circulating tumor nucleic acid (ctTNA)—positive if variants are detected in at least one of the genomic loci in cfTNA.

2. The method of claim 1, wherein the at least 2-45 individualized primer pairs are 2-60, or 2-100, or 2-200, or 2-300 primer pairs.

3. The method of claim 1, the at least 2-45 individualized primer pairs are 2-45 primer pairs.

4. The method of claim 2, where in step (e), determining ctTNA positive if at least two of the genomic loci are detected in cfTNA.

5. The method of claim 1, wherein the primer bank is a physical bank comprising 50-50,000 primer pairs.

6. The method of claim 5, wherein the primer pairs in the physical bank are pre-made and pre-validated.

7. The method of claim 1, where step b(i) further comprises comparing the analyzed sequence date with matched germline DNA of the patient.

8. The method of claim 1, wherein the first primer of the primer pair comprises from 5′ to 3′ a first segment containing a first tag being a priming site for a subsequent amplification, and a second segment containing a first target-specific sequence complementary to one strand of a target DNA to be amplified.

9. The method of claim 7, wherein the first primer further comprises a UID between the first segment and the second segment.

10. The method of claim 7, wherein the second primer of the primer pair comprises from 5′ to 3′ a first segment containing a second tag being a priming site for a subsequent amplification, and a second segment containing a second target-specific sequence complementary to another strand of the target DNA to be amplified.

11. The method of claim 1, wherein the amplification of an overlapping region of the amplicons is inhibited by having the same tag at the 5′-end of the forward primer and the 5′—end of the reverse primer, wherein each of the forward primer and the reverse primer is complementary to the DNA of the overlapping region, and a partial sequence of the 5′-end portion of the forward primer is inserted in between the reverse primer and the tag.

12. The method of claim 1, wherein the liquid biological sample is blood, saliva, urine, sweat, or cerebrospinal fluid.

13. The method of claim 1, wherein the cfTNA is cfDNA, cfRNA, or the combination thereof.

14. The method of claim 13, wherein the cfTNA is cfDNA.

15. The method of claim 1, further comprising a step (f): determining a therapy choice or a change in therapy for the patient.
